United States Patent Application Publication US 2026/0058010 A1 - sequence listing, part 44

SEQ ID NO: 496 - DNA, 913439 bp, Homo sapiens
  source 1..913439: mol_type = genomic DNA
cgcctttgcaaaattataactgaggaaattatgacagtgaaagaaatcagacctaaccgactctatcttgcttctaaccgttaagctgtccttgttcattcctgggcgtaggctgaactaactttggggaggaattcagttcatggtttgactctgaaacaaaattgataacagccctttccgaaaagacccacttcttgcctggggaccagtctgcctttgcaggactaacaaattagctacaagtttagaaattacagtttagaggtcatgcagcctctggctccaagagtctgaacctccccaaattgctcccgggggtgacatcactattgcaagccctaagatcagtgcttgagatattttgtagaccctgcactccatggatcagctgacaccactcagaccagtaatttggcgcaaccagttttgccatcacacccaggaacagaagacattaagaaaacctcacttcgaccccttatgattccatctccaacctgaccaatcagcactccccacttcctaagcccctaccagccaaattattggtaaaaactccgatccgcaaatgctcgggacaactgatttaagtaacaataaaacttcagtcttccgcacagctggctctgcgtgaattactctttctgcattgcaattcccctgtcctgataaatcggttctgtctaggcagctggtaaggtgaacccatcgggcagtttcaaaagtgctgggattacaggcatgagccaccgcgcccagcctattttttgtatttttttgtagaggcggaggggtgggggagggtgtctcactatgttgccaaggctagtctcgaactcccaggctcaagtgatcctcccgcctcggtctcccaaagtgctgaaattacgggcgtgagccactgcgtctggcccctttaagccattgtgaaaagtgatgatacacgaaaaaaaagatttccagggccgagagcggtggatcacgcctgtaatcccagcgctttgggaggccgaagcgggcggatcacgaggtcaggaaatcgagaccatcctggctaacacggtgaaaccccgtctctactaaaaatacaaaaaaattagccgggcgtggtggtgggagcctgtagtcccagctactagggaggttgaggcaggagaatggcgtgaacccaggaggcggagcttgcagtgagccgagatcgcgccactgcactccagcctgggcgacagagcgagaccccgtctcaaaaaaaaaaaaaaagaaagaaaaaagaaaaatttccaaacagggtgttcccttgtttcacattctctttggtgatggtcctgcaacagattttgataatcactatattgagaaactgcttcagattcgatctgttaggctgatcatagtattaactacaattcccagcaagccgcggagccaacctgggcctctgccggcctctgattggatacagtagccagaatgacgactcaatcagtgcttcggttgttgctttgcggcgttttccgcggggaaactgtgtaaagggtggggaaacttgaaagttggatgctgcagacccggtactggaaagtttcatgtggggtgccgttgtggggaagtggggttcgctcattatttcctgctccttccctaggctcgtgggtttcgatattgggggagcggagattttctcttgggtgctggtcacgcccccttaagactcgggatcgtcactaagaaccccgctgtgaattgggggagcttcgggccttcttttggtggggaatgcttggaagctgctcattgttggaaaaagctctttttaggggattctgggtgatgtttccgcctgttgctgcccatcttcctccccagccccttcccgcttcgggcagcctgtcattaggggaagttgagggactctcccacttcaggtggtgttggagagcgtggaatctggagtccggtccctggattcgaatgcgagcttcacaccaattgtcagctgtttaactttgcccaagtttctcaactagttacctcagtatccttatctgtaaagtgaggtaaaatatccgaagcctttggaacagtgtggcacgtaataagggctcaataaatattagctaatattgttcctaaacagttgttgaacatctaacatgaagaattttcttttcttggtggtaaggaggacagggttcattctccagggttgaccgtctcccctcatgtgcaatacacatacgtgctttcgcgcacacatacaccgcaggaatttacgtgctccggtgggggcaaacaaacttgcaagccataatagtattttgataagattatcgaatagatatgtgcgaagttgatgagaacattggagaggaaaagacttgactctggggaaggttttgtggagggaagtcagggagacaggatgcgtgacctaccaatacacataccatgtggctggagggcagatcatgtgagagtcattaaatgatgattgctgaccttaagtactatgtgccacgcactccccgagtcctttaacctccactacagtcatatgaagtagtaaattcatatgactgtaaaacaagggttttaaggaaattaagacactgagaggtgaagtaactgccaggaaggataggaactgaacgttgcaatgtgatgtatgagtgagaaggaagtgagggaccaatttttgatgtttttctctgcgaccctaagaagtttggaatttatcctgtggtctaccagtcccatgggaagtgttaaaggataatcgtgactttttaggaagctactcaaggcaggattgtgacactgatctgacttttgcaggcgaatttggggcttcttcctgtctgcttccatagcacttttaaatagcaattgtaatgcttactgcatggctgtagttatttgtgtgtacctctcttttcatctcaactatgagtattcaaaggggagggaatatgcttaaatgattcttgtaccccagacctcagcagggtgtgtatttaaatgcctgtggaaggagtaaattaaggaacaaatgaatggagtggccagaaacaatatgcaatagtccaggcaagtgatgggagtggccctattaaggcagaaatggcagaattggttgttgttaaagtccttgtagtttagaatttatagttttttgtttgtttgttttttgtttttgatagggtctcagtctgttccccaggctagagtgcagtggcatgaccacagctcactgcaggctcgacctcctgggctcaggtgatcctctcatctcagcctcctgggtagctaggactactacaggtgtgcggcacaatgcccagctaatttttgtatttttttgtggagacaggttctctctatgttgcccaggctggtctcaaactcctgggctcaagcaatttgcctgccttagcctcccaaagtgctgggattgtaggcgtgagctaccttgtgtggcctatggttcttttctttctccttctttttttttttaaattgaatttatcagtctaaatggtgtcattacttgaaactacctgatctgaaaagacactaggcaatattatagcaggtatcacttggttttctactgggggaaacaagtcattgctaacaaattcccatggagagaaatgaggaggatgtatttttgtttgtgagaggtgtgtatgtatgtatattgtgtgtgcgtgtgtgtgtgtgtgagagagagagattgattcagtctgattcagagaatttaggtgttaaatagaaatttgggccatggtattggaaataaacaaatatatacattctcagtatacatatattttcattccaaaatgttacttcttttctgataactatattgctttattccttggatccatgaagagttcctgtttcagttcgttccagaggatacttctttaccatctcaatgagatatacagcttctcctttgtatgcattaagagactcacagtaattcttttttagctctgtgaagataaatctttcatgagcctcatttacccctagcaaggtacaatagtgaaatttaactgcatgtgagaatataagcagctagtgtaataaagaacattttgggccaggtctgatcgctcatgcctgtaatcccagcactttaggaggtcaaggcgagaggatcacttgagcccaggagttcgagaccagcttgggcaacatggcaaaaccctgtctctacaaaaaatacaaaaattgggcaggcatggtgtcgaccctgtctctacaaaaaatacaaaaattagccagacatggtggtgcacgcttgtggtcccagctacttgggaggctgaggtaggaggattgcttgagcccaggagggggaggttgcagtgagctgagatcgagccactgcactccagctggggtgacagagccagacctgtctcgctctctctctctctctctatatatatatttaaaaagaacattttaatactgcagtgataaaatctcatttgattcagaaggtgtgctctgactcctagaaaaaggaagagttaaatatgattatggacttgcagtagagtgtaatggttaagaggataggtttcagaattagactgcctggattcaaattctggatcagttatttatgttttctggtgacaatggactagctaacttttccaggctttagttttctcatatgtaaaaaaggggccaataatctactttccttctagggctattgagaagattaaatgtgataatttagataagttttggaacagtgcctggtatgtggtaggtgctccataaatatacctattgccgttacagtgcaatgtaaattgttacagtgcaatagactttctagtagttctgtttggaaatatgccttgaaagttaattacatttccaaataaaatttatacatgcattgaacattttaagatgctctacaaatgtgaagtggtactatattcatgtagtaaatatcaattaattgtgtgaaattatatttgaggttgccttgtagattttctatgtgcctgtttgacgaacaattgtccctcctatttaaaacatttaaaaaggttctatagcattcctttatcagtaatatttttaacacaatatgtttcattttgcatatggagaaacttgaggaatttttaattttgttttggatagcctattcactatcacttatgttatattctgttgtttttttcatggttcttcttttctttgctggatctggaggcatgggtagcaagaaactaaaacgagtgggtttatcacaagagctgtgtgaccgtctgagtagacatcagatccttacctgtcaggtaaattttatttaacatttttattgataagttttatgcacaagttaactttataccttaatacctcttaaacttgaaatatgaaaatgtaggcttacaaaaaaaagataaatgatggtgcttttccataggctaattgtaaatatcaagcctccttgggtgcatttccaactgctatttcatttacccaaatttagtatttttgcattttgaggggaaagtggtcacggcataaggtgaagtaacagctttactgttttatagttacatgagaaataggactcaaatgaggagatactattcaacatgtatcatttctcttaaaagcaaaagaaattaatagaccattttcttattgatggagcatgagaaatatatagagcggatcttgcatttttaagcaaggtggtgaagcaaatcctccttagcagggtaaataagatttaaaggttttggttggttgtttttgttctttgttgtttttgagactaggttctcatgctgccccagctgatcttgaactcctggccttaagcaatcctccagcctcaactcccagctagctgggattacaggcacacaccactgtgcctggctagatttaaggttttatcttaggattttatcctttttttgtttgtttgtttagagtcagtgtctcactctgttgcccaggctggagtacagtggtgccatatcggctcactgcaatctcctcctccccggttcaagtgattctcctgcttccatctcctgagtagctgggattacaggcacatgccaccacacccagctaatttttggatttttagtagaaacggggtttcaccatgttggccaggctagtctcaaattcctgatctcaagtgatccgcctccctcagcctcccaaagtgctagcattacagacatgagccaccgtgcctggcctgattttatctttaataagacattttcacagagcattctgcaattttttttttgaattgctttctgtgttaaagataacatcggttcctttgttatacatttaattatttgcatatttatactcggaaacattcttaaaagtatgaaatttgttatttcatcctatagtcagtttcattctttttcaactacgaaatattatctctgagtgaacttctagcttagaaagaaactctttcggccgggcacggtggctcacacctgtaatcccagcactttgggaggccgaggtgggcagatcatgaggtcaggagttcgagactagcctggccaatatggtgaactcttgtctctactaaaaataaaaaaaattagccaggcatggtagtgagtgcctgtagtcccagctactcaggagtctcaggcagaagaatcgcttgaacccaggaggtggaggttgcagtgagccgagatcgtgccactgcactccagcctgggcgacagagcaaaactcttgtctcaaaaaaaaaaaaaaaaaaaaaaaaaaaaaggaaagaaactctttcaacctgacactttctgggcatatatttatacccaaattctttttggcacaagtgtagcgctcatacgcacctggattggatgctggtgctatgtgatattatttggtgtatcctctggtatatgccaactaaacaggataattagaagataagtttgtgtcattacaacttttagttaaggcatatttatggggaaaatactacaatgaatgtataaatctttgatctgcgataaattatacttttgtctacataagcagtatcaattgaaggtttccttttaactctagtatctttgttacacatatatgtttaaaatactctctttatgtttctttaggactttttatgtctttccccactggagcttatgaaggtgactggtctgagttatcgaggtgtccatgaacttctatgtatggtcagcagggcctgtgccccaaagatgcaaacggtatatttatattttattatgatttgattatgaatgattcctcatctcattaaacatgtttttttagggatgaggcacatgcagaaatagagatgagtacctcaaaaatactgagttttctactatagaagttagttctctaaggaaaatacatgtgaaaattttttttttcttttttgagacgctctgttgcccaggctggagggcagttgcacgatctcggctcactgtagcctctgcctcctgggttcaagcgattctcctgcctcagcctcctgagtagctgggattacaggcacggtgctaccaagccaacttatttttatattattagtagagatgggatttcaccttattggccaggctggtctcaaacttctgacctcaagtgatctgcttgcgtcgacctcccaaagtcctgggattacaggcgtgagccaccgtgcctagcctatgtgtgaaaaatttatgtagtttataaactcatgggagacaatttctaaatatgggaattagggagcaacagaaagtttttatttttttttctatagccaatagcagtagttcaaaaggtcatctttctctgattgattaggtagtatttgatggcctcatagttaaattataatcttaattttagaatgcccctttctttgatatactgacctttaccatcatcacttgctctagatcataaagtacacataattgtacttgtagttgcttattgattgaataaaaggtaattaaaaatttatcctttactcttaagaaaatttgaagtcttttacaaaagccctcatcaaattgtacattttttcagactttttgtgtcatgactgtagcttttcaaaatgtagatttggagcatgatagaaatatcttgttttctcacagtaagagtttcctaaaattctgttcggtgctttgcaaatgtatttatttatgtggactgtaagtttcttaccttactgccttatattgaaatttactgaacactgaacaatgaagtacaattctctgaagaaggggagaaggaaggaatgttagtgtcactggaaacttctaaaaacaatgaacagatatttgaacaacagatattttctttcttttttttttttttgagatgaggtctgtctctatttctctggctggagtacggtggtgtgatctcggctcagtgcagcctccgcctcctgggctcaagccatcctcccaccgcagcctcccgagtggctgggactacaggtgcacaccaccatgcccaactacgttttgtgttttttgtagagatggggttttgccacatagcctagactgttcttgaacttatgagctcaagtgatcctcccgcctcggcctccccaagtgctgggattacatcagccactgtgcctggccaaacaacagatattttcttttgttcagatttagcttgtgatctgaggaaaatattttaaagacaggatagtcagaaggagaatcagaactggagttagaaactggcattagtcttagctttatcattgatttcattgcttgaacagctttcttttatgggagaaaacagaagttaaaatactatgcaatgattctgtgactagattcaaattaacttgttattattttgaaggttgtaaagcaccagaaaaacctttaatttgtcatctgtcattctaattagtcaatatccatggcatatttcccgttaataaatagagagcatggtcccgaaattcaactttaatttctacttccatcactaccttcagctgccatcttaatacaattccaaatacagttcaagaaaccatctttctcctatggtttacattcattcttgtagcattccttatatttcagcactgccctaaacactggcttagttttttttttttccaacttttattgtaagttccggggtacatgtgcaggatgtgcaggtttgttacataggtaaatgtgtgccatggtggtttgctgtatggatcatcctatcacctaggtattaagctcagcgtccattagctattcttcctgaagctctccctctcccccacaacctcgcaacaggccccaatgtgtgttgttcccttccgtgtgtccatgtgtccatgtgttctcatcgttcagctcccacttataagtgagaacacacagtttttggttttctgttcttgcattagtttgctgaggatgatggcttccaactccatccatgcccctgcaaaggacataatctcattcctttttatggctgcacagtattccattgtgtatacgtaccacattttctttattcagtctatcattgatgggcatttgggttgatttcatgtctttgctattgtgaatagtgctgcaatgaacatatgtgtgcatgtatatttataatagaatgatttgtattcctttgggtatatacctggtaacggcattgctggttcaaatggtatttctgcctctaggtctttgaggaattgccacactgtcttccacgatggttgaattaatttacactcccaccaacagtgtaaaagcattcctattagtctgcaacctcaccagcatctgttgtttcttgactttttagtaattgccattctgattggtgtgagatggtatctcattgtgattttgatgtgcatttctctaatgatcagtgatgttgagctttttttttctatgtttgttggctgcatgaatgtcttcttttgaaaagtatctgttcatgttcttagcccactttttaatggggttgtttggttttttttttcttgtaaatttgtttaagttccttatagagtctggatattagacctttgtcggatggatagattgaaaaaattttctcccattttctaccatgatagtttcttttgctatgcagaagctctttagtttaattagatcccacttgtcaattttgcttttgttccaattacttttggcatttttgtcatgatatctttgcttgtgcctatgttctgaatggtattgcctagattttcttcaaggttttgttttttttcctatagttttggattttacattcaagtctttaatccattttgagtcaatttttgtgtaaagtgtaaggaaggggtccagtttcagtttcctcatatggctagtcagttctcccagcatcatttgttaaataggcaatcctttccccattgcttgtttttatcaggtttgttgaagataagatggttgtaggtgtgcggtcttatttctgagttcttctgttccattggtctatgtgtctgtttttgtatcagtaccatactgttttggttactagagtcttgtagtatagtttgaagttggatagcatgatgcctgcagcttcattctttttgctttggattgtcttggctatacaggctcctttttggtttcatatgaattttaaaatagctttttaaaattctgtgaagaatgtgaatggtagtttaatgggaatagcattgaatctataaattactttgggcaatatggccattttcatgatattgattcttcctatccatgagcatagaatgtttttccatttgtttgtgtcctctctgatttcttggagcagtggtttgtagttctgcttgaagaggtccttcacatcccttgttagctatatttattgctaggtattttcttttctttctttcttttttttttttgagacagagtcttgctctgtcgccgaggctggagtgcagtggcacaatcttggctcactgcaagctctgcctcctgggttcacgccattctcctgcctcagcctcccaagtagctgggactacagatgcccacctccacgcctggctaagtttttgtatttttagtagagacggggtttcaccatgttagccaggatggtctcgatctcctgacctcatgatccgcccgcctcggcctcccaaagtgctgggattacaggcgtgagccactgtgcccggcccagtattttattttctttgtagcaattgtgaatggagttcattcataatttggctctctgcttgcctgttgttggtgcattggcttagttttagttcatttcttcaggaaattttttttgctcatttattcagtcatttattcttttgacctgtatttactgaatgtcaagcatgtattaggtactttgtcaggcaccaaggctatcatggtgaacaagtttatacagtccagccctcttgtagtttacagtctagtgggggaagccagacattaaaatattaattcagaaataattagttaattataatagtgctaaatcctatgaaggaaaagcataaggtactttgaaactttataatagggattacttagtttgggggtcaggaggacccttgcaaggaagcaatactttagctaaaacatgaaagatgaataggtgagagataggcaaaggagctgggaagggagatgggcagggaagagttattgggcgttgggtataacagatgcaaaggccctgggaagtgaaggagaatggggcttgcgtgagtgggtcataacaacgaagaagagagtggtaagagatgaagccagagaagtaagcaggagtcagattattagggctttgatttggactttattccaagagcaatggaaactcataaaagggtatactgtaatatgtgttttaaaaaaaatcagtcttggacatggacaagtgattgaaaaggagcaataaaatattcacgaagattagttaggtacctattactgtattccaaacaaaaagtgatggtgacttatattattaatgcagaggttatagtgttgattaatatgacagatatttaggagggataatttttgtttttttttgagacagagtctcgcactgttgcccaggctggagtgcagtggtgcgatcttggctcactgcaatctctgccttctgggttccagcaattcttgtgcctaagcctcctcagtagctgggactacagacatgcaccatcacacctggctaatttttgtatttttagtagagatggggttttgccattgtccaggctggtctcaaactgctggcctcaagcaatccacccacctcagcctcccagtgtgctgggattacagatgtgagccactgtgctgagcctaggagagagaattaatgggatttggtgattgtttggctgaggtggtggtgaagtataggaaaatgtcagagatgattctctgacttttgctttgagaaactgagtggtaccatttcctgagatcaggaatactggaagaggagcaggtttgagggaggcagatcatagattcaatttagtacttgtgtaatttttttttttttgagatggagtttcgctcttgtcacccaggctggagtgcaatggtgagatctcggcccaggctcccacgttcaagtgattctcctgcgttagcctcccgagtagctgggattacaggcacccaccactatgcccggttaattttttatatttttagtagagacggtttcagcatgttggccaggctggtctcgaactcgtgacctcaggtgatccacctgcctcagcctcccaaagtgccgggattacaggcgtgaaccaccgcccccggccagtacttgtctaatttaagatgtttataaaacatttagtgaagatgggaaataggcagttaaatatatggacctggactttgaaggcgaggcatgcacgtgggagtcattggtgtaaatatgatagttaaagctatcagaatggatgagtgattgcctataaagtgcatacagtaagacgataagtgtacttaagcctgaaacctgagtgatgccaacagttacaggtcagattagatgataatgagtctgagaagaagcagccaccgaagtagaagaaaaattggtagtgtcatatcacaaaactcttctttgtctcatttatatacatactacttttctgaagttttgttctgttagttcattttattcctttttttgagatggagttttgctcttgttgcccaggctggagtgcagtggcgtgatcttggctcaccgcaacctccgcctcccgggttcaagtgatgatcctgcctcagccccctgagtagctgggattacaggcatgtgctaccatgcccagctaattttttttttttgtatttttagtagagatggggtttctccatgtttgtcagcctggtctggaactccggacctcaggtgatacgccggcctcggcctcccaaaatgctgggattacaggcgtgagccaccacacccagctgattattctttttttgacttaccgaatctattattctagaaattacacttaaaattgtaagtgaagtgctttaattttgacagattgggctgcctttgcatgtttgagaaagtatccccacatgcatccacgttgcctgatgataggttatagaaaaaaatgtctacgtaaggatgccgactgaaatatttcttatatcaaaaaattggaaacaataataataggaaggagataaattatattacatttatgttagggaatattatgtaggcactaaaatctttaaaaaatatttgtttgtttattgatttttacagaggcaaggtcttgctatgatgcccaggctggtcttgaaatcctggctgcaagtgatcctcctgccttagcctcccaaagtgctgggattacaggcatgagccatcatgcccagccaataatttttaataacaggagaaatgcacaggatataaatggttagtgaaaaaagcaggctacaaaattgtatatagtatacatgccaattttataaaaatgaccgttataaaggtatttggtgtatattgttaataatggttatctcaggattgtggaattttttactgttctgttttctttaactttttttttcattccaaatttgctttaggtatgttatgttctttaggaaaaaagcagcaacagttcttgtttgtccccttgcagtaatatctggcaattctcttagtctcagtttttttaccatttgcgaaatggagataattatacctgtgtgtaaatgaaataatgtatgtaaagtacttaatacagcacatagtagatgtgcaacagatgttcattagcttcctgtccttgccttttccttactgttcatgattcctgaatcacagcaatatctaagaggagctgatgttatttgctccatatcctagcatagtgactggacagtgccctggagcaggcaaaactaaactgaaatgtaaagcagaccattaacaaagggaggttgtcaaaagcccttaaaagaataaaaggaacattagaaaataaacatcttttaaaaatcaggtaaaattttaatatcccagaagattaataaaagtaattaaaaaaacaattttccttatagagtattaacttttgtagttctaaatacatcagaatgatcaaaaccaacaaatgaaatcaccagaattctttgtataatttcttgtggacaaacacaacaccaaggataagaaaggagaatttcgggccaggtgcagtggctcacacctgtaatcccagcactttgggaggccgaagtggtcaggtcacttgagggcaggagttcgagaccagcctggccaacatggcaaaaccccgtctctactaaaaatacaaaaattagccgggtctggtggcaggcacctgtaatcccagttacttgggaggctgaggcaggagaattgcttgaacccaggaagtggaggttgtagtgagctgagatcgcatcactgcactccagcctgggtgacagagtgagactctgtcttgaacaaaaaaaaggagaatttcagaattgtattatattggaaaaacttcagatatgtagtgtttctccccttgttcacagggaatatgtttcaagaccctcagtggatgtttgaaaatttggatagtactaaactctatgtatactatgttttttggatctgataactgagatgataactgagatactgactaatgggcagggagtgtctacagtgtgtatacacttggcaaagggatgattcacatccaggtgggatgatgtgagatttcaccatgctactcagacctgtgtgcaatttaaaacttatgaattatttctggaattatccatttaatattttcagatcaatgttgaccaggggtaactgaaacatgggaagtgaaaccgtggataagggggactgttgtactgtgtacctgggtttagatatagttgctagtaccaaaagtttttatccccactactattaccttcttctagctaccattatttttctttggaatgactgtaacgtcttcctgacagatctcccagcttcaagctgttcttcacaaactaatctgagtatgtctttgaaattataatttgttgtattagtttcctgtggcagttctaatacaaatcacaccctgggtggcttcagacaacagaaatttattctcttacagttttggagttcagaggttcaaaattaaggtgtaggcagagctgcattctctccagaggttctaggggattatccgttccttgcctctttcagcttttggtggccattaacattccttggcttgtggctgcttctctctctataccatcttcacataaccttttcctgtgtgtattgaattccctctgcctctcttattagtgtgggtatttagggtccatctggataatccatgattatcccttcatctcaagagctttaacttaatcacatctgcaaacacccattttgcaaataaggtaatattcacagacaggttctggagatttgatttggatatccaggggtgggggtggggggtcatttctcagcctaccacaccttccttcacactgttcttcacaaacgaacccaagtttgaaataacttgttcatgtcactcctttttgcatcttcaacagagctgtttatggttaggcccctgcttacttctctagcctcattgcttgctgtgctacacccacactccatctttcaaccattctaaatgaactgtatatttacagtttgtgttagtccctgtttcctctcttgcttcttgacctttctttgtacattctgtcctctttggcaggaatagtcaaatttcctttgcttacctaacagctctttcagattttagcacgggcatccagcaattccattaagtttccaaaatctgtatcagttatactttccctattacaatatctcttattaattgtgttgtaattgcctggtttctagtcctaatttcatagtccctggttgacttcataagactgtgagggcaacgtctctctctttctgttatgtcatatccccataatctagcacagtccctggcacagagtaaatatttgttgaacaaataaataatagaagggaaaaggatggattagggttaaaattgctaaaatttagagaattaaagttggtttatgtttttgaatatatatagaggttgaaaaaaaacttaatcattttcttgtttaggcttatgggataaaagcacaaaggtctgctgatttctcaccagcattcttatctactaccctttctgctttggacgaagccctgcatggtggtgtggcttgtggatccctcacagaggtaaaggaaaaatttttcgtaccttcttccattgacctataaccttcagagctagggaaaaagtttagttaaaaaacataaattatttctggaacggtaatctgaattaaattataagtacttcaaggatatggttctccactcagtacttagtgtggttgttctgcaaacagaggtgttaaaaacaaaatccttgctgactgattaaaatctacttaggttgctgtttcattgagttaacttagaaagtgataaatattgctgggtgtgtttatatatgtgttatatatataatgcatacatatatgttatatatacatacatgcatacatacatttatatgtacacacgtcacatatatgtaatatatacacatatgtcatatatgtaatatgtatgcacataaataacattatatattttatatatatgattatatcatgcctgtaatcccagcactttgagcaacaaggcaagaccctgtctttaccaaaaaaaaaataaaaaaaacccagaaaccatttagccatatgtggtggtgcatgcttatggtcctagctactcaggaggctgaccttgagccagggaggtcaaggctagagtgagccatggtcacaccactgcattccagcctgggtgacagagcaagaccctgtctcaaaaaaaagaaagtggtaaatattatgaaataatattatgaaacaattgggggaattaaaaaaggatcactccttataaattaggaaggacaatttgaaattttattaacatatggaaaaattatagtattaaactaaagtgagctgtttttactttctgttatagataaaatttcttttaggaagtgataggttattggattagttaatactgttggataacaaattatcccaaaactaagtggcttaaaacaataaactttggttatttcttagtttctttgtgagtggcttagctcagcattgttggtgagggatgcagtcatctgaagcttggtaggggctgtaggatctgtttctgaggggcccacttacatgactggcaaatgggtgctggtggttggcaggaggccacagtgcctcaccaggtaggctctccacaggcttcttgagtcttatgacatgatggctgacttcccccaggtgagtggtcttgaagaaggcaagatggaagtggtgatatctttggcaacctagctttggaagttacacaccactacttctgccacttttcgtcattagaagtgagtcattaagtcaagcctacatttaaggaaagggaaattagcctcttttttttttttttttgagacagagtcttgctctgttgcccaggctgaagtgcagtggcacaatcttggcttactgcaacctctgcctcccaggttcaagtgagtagctgggattgcaggcatgtatcaccatgcctggctaattttttgtatttttactagagatggggtttcaccatgttgtccaggctggtctcaaactcctggcctcaggtgatccacccacctgggcctcccaaagtgctgggattacaggtgtgagccactacacctggccaaccttttggaggaagaagtgtcaggaatttgaggacattttaaaaccactgcagttattttccttgaaaactgcttacaatgtggtgacttcatagacaatgtttatcaatacactcctgaggacttcttgcttgaaagttctaggggcataaatactttcaggaaacttctaaacaagaacagattattttcttacattctgatagtcataatttaactgtggattttttttccttggagatagggaccctgttttagatactatattttatttcctgtcttccaagagagatttaaagatttatatgagcaacacctagcagatgcctattaaatagttggtaaataaatgcgtgaattagttattaataaaaatgcacacacacacatacacacacacacacgcacacacacacacatcctcttcttttggaatatactgccaccaggtggtgccagaatcacatgattttacataaactttttgggctgaagttccacttgcttaaacaaggtttattacagtgtgatccacagtcataaacttacttatttaaatagcaaaaacattgaacttaaggaagattaactgggaaattctttttactttttaagttttagaataatttttaatactttttcacttagcttttattaattattttttaaaatccaaacagaagttacaagccttttaggtgttttgttgttatctaattggctgacttggaataggaatataaatactttgactccttagtaggggcaaattctctcctttctgttctagctacaggtagcttcttcaatcttttttgttttttgtttttcaactgagtacagggagtatatcaaattatcctcaaacagagttttttttgcttttattacaatttttaattgatacaataattgtatatatttatggggtacagtgtgatattctgatatgtgtgtgcaatgtataatgatcaaatcaggtaattggcatatccatcacttcaagcatttatcattttttgtgtgtgttcggaacatccaaaagcccctcttctagctatttgaaaatatataataaattgttgtaaattatagtttacctaaggtgctatagaaaactaagacttattcctcctgtcttgctataattttgtaactgctaaccaacctttggctgtctccctctaaccatctcagcctctaataaccactattctactctccacttctatgagatcaatttttttagcttctacatgtgagtgagaacatgcaaggtttgtctttctgtgtctgacattttactcaacataatgaccttgagttccatccatgttgttagagatgacagaatctcattcttttttatggctgaaatagtactccattgcatgtatgtaccacatatttatccatttgtctgctgatggacacttaggttgattccatctcttgggtactgtgaatagtgctgcaataaaaatgggagcgtagattgacatactgatttcatactgtgtatcatacatgcgcatgcacatacacacatgtggaggtaagagagagctagcaaaacgataaagtaaattgggcaaaatgttaacggtgggtggatgtgggaaaagaatgcatatatatattctgtattgtttttatttatttttaatttatttttattttaaattaaaaaaaaagatacatggtctagctgtgtcacctaggctggagtgcagtggcacaaccatagctcactgcagcttcaaactcctgggctgaaatgatcctccttcctcagcctcccaagtagctaggactacaggtgtgcaccaccatgcctggctaattttttaaaatgttttgtagagatgagggcttgctatgttgcccagactggtcttgaactcctgacctcaagtgatcctttctgccctggcctcccaacgtgttgggattacaggtgtgagctactgcgcctggccttctgtttttattaataccattttcctgtaagtttaaaattatttctagataaaaaagtaaaaaaaaaaaaacctgtgatgtttgctgtaagtagatatccttgatcagaaataaagaactttcctccatttcctagctaaaatactaatttggtgttacattttatcaaaaacttttttttctgcattgattgaaatgattgtattatttttcatctttggtctaatagcatggtgagaaacatttaatagatttttctgatgttaaactactattgcatttttgggacaagttcaacttggtcatgatatattatctttttttataaactgttggattcagtttgctaatatttaagatttttcaatatttaggatggatattcagctgtaattttccttttagtagtgtctttgtctgaattagtatttatcttatactagtttggtagaatggattatggaatatctctttttttaatattctgcaatagtttgcctatgatgggaattatttgttccttgaagatttggtagaacttgtctgaaaaattgtctgatcttgatatttttccttctgagaagattttttaaaaattcaattcctttaatgattataggactactcagattttctatttcttcttgattagttacagtgaatgagatttttaggaatttgtccattttctttatgttttcaaatttattataataaagttattcattacaatcttccagctcttaaatctggttttacatgtggtttttgtccccctttccatttctgatattacttactttgttttatttctccctctcttttaaaaaaaatcttgtcagaagtttgagtatgtatgtcatcattttaaagaactctgcattttgttgttctttgttggtcttctctattatttcttcatcttctacctcctttatttctgccattttcttattatctccttttatttaatttttttgtggggttattctttgcttctaacttcttaaattagatatttaatctattaattttcagtttttctttttactctgaccttttaagactgaatttttcttgaagcattctattttgagatatagtatttccattttcattctgttctagaagtatttaaacattcccatcacaattgcttctttgactcatgtatcatttggaattttaaaatatctaaattacttaattaaaaaaatttattttaattacattattaatctaattgcatttttgtcagataactttgcatgatattgattttttgaagttccctgagacatcttttaaggttaaatatgtgatgaactttgataaatgttgcacgtgtgcttgaaaagaatgattattctctaataattgggtgccctattttattttaggttcagggggtatatgtacaggtttgttacattggtatattgcgtgatgctgaggtttggggtacgatttataccatctctcagctactgaacatagtccccaataagtagtttttttagcctttttccctgctcccttcttcctccttctaataatctccagtgttgattgttcccatctttgtgtccatgtatacccaatgtttagctcccacttataagtgagaacatgcagtctttggttttctgttcctgtgttaattcacttaggataatgaccaagagctgcatccatgttgctgcaaaggacatgattttgttctttttatggctgtgtagtagtccatggtatatatttaccacattttctttatctactctaccatggatgggcacttaggttgattccatgtctttgctattgtggatactgtggcagtgaacatacgagtgcatatgtctttttggtagagtgatttattttcctttgggtatatatccagcaatgagattgctggctcaaatggtagctctgttttaagttctttgggagatctccaaactcctttgcacagtgattgaactaatttatatttccacctacagtgtataagcattccattttctctgcaccctttccagcatctattattttttgactttttttttttttttgggacagagtctcattctgttgcccagcccggagggcagtggcacttttggctcactgcaacctctgcctcccaggttcaagtgattctcgtgcctcagcctcctgagtagctgggattacaggtgtgtgctaccatgcccagctaattttattttttagtagagatggggtttcaccatgttggccaggctggtctcaaactcctggcctcaagtgatccgcccacctcagcctcccaaattgctgagattataggcatgagccactgtgcctggccattttgacttcttaataatagccattctggctggtgtgagatggtatctcattgtggttttgatttgcatttctctaatgattagggatgttgagcattttatatttgatggccacatgtatgtcttcttttgagaagtgtctgttcatgtcctttacccacttttaatggggtcattttttgcttgttgatttgtttaagttccttatagaatctggatattagacctttgtcacatgcctagtttgtgaatattttctcctattctgtagggcgtccatttattctgttgatagtttcttttgctgtgcagaagctctttagttaggtaccacttgtcaatttttgtttttgttacaatatttttgaggtcttagccattagttctttgccaaggctgatgtccagaatggattttccttggttttcttctaggatttttatgggttgggtcttagatttaaattgttgatccatcttgagttaatttttgtaaatggtaaaaggtaggggtccagtttaattattctgcatatggctagctggtaatctcagcagcatttattgaataggaagtcctttccccatttttttattttcgttgactttgtcaaagatcagaggttgtaagtgtgtggtttcatttctgggttctctattctgttccattgatcactatgtctgtttttgtaccagtaccatgccgttttggttgctatagtttgaagtcaggtagtgtgatgcctctagctttgttctctttgcttaggattcccttggcttttcagactcttaacttcccatatgaatgttagaatagttttttctaattctgtgaaaaatgacattggtaatttgaatctgtacattgctttgggaaatatgccattttaacggtattgattcttcaaatccatgagtatggaatgttttttcatttgtttgtatcatctatgatttcttgtagcagtgttttgtagttctccttccaaagatcgttcacctccttggttagatgtattcctagatattttattttttttgtgtagctattgtaaatgggattgtattcttgacttggctctcagctggaatgttattggtgtatagaaaagctactgatttttgtgcattgattttgtagccttcaactttactaaagtcatttatcagttctgggagccttttggagcagcagtctttagggttttctaggtatagaatcatattgtcagtgaagagagatgattttgctttttcttttctattttgatgccttttatttctttccctttttgagatggagtctcactctgtcgcctaggctggagtgcagtggcacaatcttggttcactgcaacctcacctcctcaccttctcttgcctcagcctttcaagtagctgggactataggcgtgcactaccactcccagctaatttttatatttttagtagagatggggtttcaccatattggccaagctggtcttgaactcctgacctcaagtgatctgcctgtctaggcctcccaaaattctgggattacaggcatgtgccaccgtgcccagccttatttctttctcttgcctgattgctctggctaggacttcctgtactatgttgaataggagtggtgagactgggcatccttatcttgttctagttctcccaaattttgcctgtttagaatgatgttggctgtgggtttgtcataaatgggtcttagtattttgaggtatgttcatttcgatgcctagtctgttgagggtttttatcatgaaggggtgttggattatgttgacagctttttctgtgtctatggagatgatcatatggtttttactttaaatctgtttatgttgtgaataacatttattgatttacatatgttgaactagccctgcgtctcaggaataaagcttacttaatcatgatgtattaactttttgatgtgttgctggattcagtttgctcatattttcttgcagatttttgcatccatgttcatcagggatattgacctgatgctttctttttttttttctttttttaaaattttattattattatactttaagttttagggtacatgtgcacaacatgcaggtttgttacatatgtatacatgtgccatgttggtgtgctgcaccaactggtcattttgcattaggtatatctcctaatgctgtccctccccccctcccccacaatgctgtcttttacattgtgtctctgccagattttggtgtcaggctgatactggtcttatagaatgagttattgaggagtccctcttcctcagttttttggaacattgtcagtaggaatggtataagtgcttctttgtacatctggtagaattaggccgtgaacatgtctggtcctgggatttttctgcttggtaggctttttgttacttaattcaatttcggacctcattattggtctgttcattagtttaatttctttctggttcaattttgggaggttgcatgtttccaggaatttatgcatttcttctaggttttctagttagtgtacatagaggcgtttgtagtagttctctgagggttttttgtatttctgtggggtcgatggaatatcacctttgtcatttctgattgtttatttggatctttttttttcttattagtctagctagcagtttatcttatatattctttcaaggaacaaactccttgattctttgatctttttaattatttttttttttgcatctcaattttgttcagttcagctctgattttggttatttcttatcttctgctagctttggggttggtttgctcttgcttctctgtttcctctaggttagatgttaggttatttacttgagaacttctgaactttctgatatgggcttttaacagtataaactttcctcttaacactgttgtagctgtgtcccagagattctggtatgttgtatctttattctcattagtttcaaagaatttcttgatttctgccttaatttcattgtttacccaaaagtcactcaggagcaggttgtttatttccatgtaattgtatggttttaagtgattttcttagtattgatttctatttttattgtgttatggtccaagagtgtgattggtatgattgcagtttttttttttaatttgttgactattgttttatggttgattgtgtggtcagtgttagaacatgtaccctgtacagatgaaaataatgtatattctgctgtttttgggtggggagttctgtagatgtctattaggttcatttggtcaagtgttgagttcaggtcttgaatttattagttttctgtcttaatgatctgtcttataatgtcagtggggtgttgaagtctcacactattattatgcagtctcttcataagtctttaagaacttgctttatgaacctgggtgctcctatgtttgctgcatatataggataattaggtctttttgttgaattgaatgctttaccattatgtagtgcccttgtcttttatatatatattatatatatatattttttttattatagtttaagttctagggtacatgtgcacagcgtgcaggtttgttacatatgtatacatgtgccatgttggtgtgctgcacccattaactcgtcatttacattaggtatatctactaatgctatccttccccgctccccccaccccacaacaggccccagtgtgtgatgttccccttcaaaaatgatgagttcatgtcctttgtagggacgtggatgaagctggaaaccatttttgtctttttttatctttagtggtttaaagtcggctttgtctgttataatagcaacccctacttttttctattttctgtttgcttggtagatttttctctatccctttattttgagcttatgggtgtcattgcatgtgaggtgggtctcttgaagatggcacaccattgggtcttgactctttgtccaacttgccactctgtgccttataattggggcatttagcttgtttacattcaacgttaatattgacatgtggatttgatattgtcatcatgttgttagccggttattatgcagacttgtttgtgttgttgctttatagtggcaatggtctatgtacttaagtgtgtttttgtagtggctggtgatggtctttcctttttatatttaacactcccttcaggacctctcgtaaggcaggtctaatggtaacaaattcccttagcatttgtttgtctgaaaaggatcttatttctcctttgcttagtttggctgcatatgaaattcttggttggggctgggtgtggtggctcacgcctgtaatcctagcactttgggaggctgaggcaggtggattgcttgagcccaggagtttgagaccagccggggcaatatgatgaaaccctgtctctacaaaaaatgctaaaattagccgggtgtggtggcatgtgcctgtagtcccagctactcaggaggctgaggtgggaggactgcttgggcccaggaggtcattgctgcagtgagccatgatcatgccactgcactccagcctgggtgacagagtgaaaccctgtcacatatacacacacacaaaaaaacacacacacgaaattcatgattggaatttctttaccttaagaatgttgaatatagtcctccaatctcttccagcttgcagagtttctgctgaaaggttcactgttcgcctgatggagtttcttttgtaggtgacttgccccttccctctagctgcctttaacatttttttccttcattttgactttgatgaatctgatgactgtgtcctggggatgatcattttggatagtatctcacagaagttctctgcatttcttgaatttgaattcaggcccccagctttgttctctgggcccttcaggttaggaaccttctgtgctggaggagcccaggtgttcttggatctctggccacaacactgatgtgtggtgccagccaaattgcgttgttggggtggtggcagtgggatctgtgcttgttcacatgtaccaacagcagctgcgttatggtgggatgcacactccatggcttggatggggtgctggtgggtgcggcgctgccagcctctgtgtgcatattcatactggtggtggtgttggcgcatggggtagtgcggtgctggcaggtacagggctgccagtctccatgtgtgtgttcgtgctggtggcagtgtggggggtggcgtgtgggttgctgtcctccgtatgcgcgtttgcagtggcaatggccacgcagtggtggggttacactctacaccacagctgtggcatagtgggatgcatatgcacatgggtgccagcgatggaggggaggtgaggtctacccacacgtgtgccagcaaaacggtagggcaggtgggggcgtggccgagtgcatgttcctgctggcaaagcagcacagaggaggctgcagtcagtggtggtctggtgtgcctcagtggaggctgctctactggagctcttgatggtcagcattatctgccagtgaaggagctatgatgtaggccccctggaggcacctcagttgggcatccgagggtacactgcaagtgtgctccaccaggttgggaccctgggagaggccagcagacaaggggtgctttgattggactggctccatttcacatgcaagaccaccatgatctgttcagatttgacagttctcctaaggctaaagtctcctaggagagcatggtgagccttgggagatggacaaccctggttgtgctccactgcagacattactgcaccaaaccctctgggttccacactgcattcctacccctaccacctctctaagcacctctcccagccagctcaggtgtccacaccctggggtcgtggggtctcctgctgctaggatttcagaggtctgtggtgagaggggtttgtttttcacctcttcaactcaccccttcctcaggagtccttgagggccagaagtaagtcttggtgtgtgatagcccaatgcagggttcccagtttcttctttcttcagcccagcatctatatcctccctccatccattctcattgccttccctccaaagatctcagaatgtgccagtcttcccaaagtcccagtcacttggtggcatgtgttcctcctggctgcgtctagttggccatcttgccccagggtcttctctctaattttaggcatttattttcttctgctagttttggggttggtttgttcttttttttttttttttttttttctaattccattaggtgcaaagttaaattgttaatttgaaatctttctaacctcttgatgaagaaatttagtgttataaactttcctcttaatactgctttagctgcctcccagagattttgggaagttgtgttcctattttcattaatatcaaataattttttgacttccgccttaatttcttgttcacccaggagttattcaggagcaagttgtgtcctttctatatttgcgtagttttgagagatcttcttgatattcattttaatttttttggcactgtggtctgatagtgtgcttgatgtgatttcgatttttaaaaaaatttattgacacttactttatgaccaaacatgtggttgctcttagagtatgtttcttgtacagttgagaagaatgtatattctgtggttggtgtgtggatcgttctatagatatctgttaggtttaattggtcaagtgtcaagtttaagtccagagtttctttgttatttttctgccttgatgatctttctgtcactgtcagtggggtgttgaagcccccccccatttttgtgtggttgtctaagtctttttatcagtcaagaagaacttgttttatgaatctgggtgctccaatgtttgatgggtatatatttaggatagttaaatcttcctgttggattgtacacttttttgttgttgttgttaagatggagtctcagtctgtcaccaggctggagtgcagtggcacgatctctgctcactccaaactccgactccttggttcaagtgattcttctgcctcagcctcccgagtagctgggattacaggcacgtgccaccacaacccaactaatttttgtatttttagtagagatggggtttcaccatgtcggccaggatggtctcaatctcctgacctcatgatctccctgctttggcctcccaaagtgctgggattacaggcgtgagccaccacgcctggctggattgtaccctttatcactgtgtaatacccttctacgtctttcttagtcgttatggtttaaagtctgttttatctggtataagaatagtgacttctgcttgttttccatttgcctgctagctctttcttcatccctttttactttgagcctgtgggattacatgtgagatgggtctcttgaagacagcagatggttgagtcttgtctttttttttctagcttaccattctgtgtcttttaagtggggtgtttagaacacttaacattgaagtttagtaatgacatatgagactttgatcctgtcattgtgttgttggctggttgttatgtagacttgattgcgtagttactttatagtgtctgtgggctatgtacttaagtgtgtttttgtggtagcaggtgtcgttcttaccattccatgtttagcatttcctgaaggacctcttataaggctgttctagttgaaacaaattccctcagtgttttcttgtctgagaagacgagataaatttatttatttttcacttatgaagcttagtttgtgggatatgaaattatttgttggtatttcttttctacactgaaaataggtccccactctcttctggcttgcagtttctgctgagatgtctggtgctagcctgatggggttccttctgtccatgcattaccattctctcttgcttccttcaagacttttttcttttgcattgacctcgttgaatgtctgtgtgcctttgggatggccattatgttgtctggatttcttgtacctggatatctacatctctagcaatattagggaaattttcttgaattattccatcaagtatgttttccaggttgtcaactttttctcctctctcaggaatgccagtaattcataggtttggttgctttacgtaatcccacacttctcaaagactttgttcattttataaaattctttattctttctttctttttttttctttttcctttgagatggagttttgctcttgttgccccagctggagtgcaatggcgcaaactcgactcactgcaaccttcacctcccgggttcaagcaattctcctgcctcagcctcccaagtagctgggattacaggcatgcgccaccacacccagctaattttatattattttagtagagatgggttttcaccatgttggtcaggctgatctcaaactcctgatctcaggtgatcctcccacctcagcctcccaaagcactgggattacaggcgtgagccactgcacctggcctaaaattgttttttcttgacttttgtctatatgtgttagtttgaaatatcagttgtaattatttttttctgcttggtctagtctgttgataaaattttcaacagcttggcaatcataaagtgaagttttcagttccagaagctctaattgattcctttttaagatgtttatctcctttttcatttcctggattgttttattagattctttgtgttgattttcagtcttttcttttatatctttgagtttcttccaatccatgctttgaattatttatctgacatttctgagtttccattttggttggggacctttcctagagagctactgtgattctttggtggtgttacaaaaattggatttttctggtgccagcattcttatgttgcttccttctcatttgtaggtgttggcacttctaaatttttgttttttgagacaggttctcactcttttgcacaggctgaagtacagtgaatcatgtcccactgtagcctcgacctcccaggctgaagcaatcctcccacctcagccttccaagtagctgggactataggcgtgtgccatcatgcctggctaattttttaattatttgtatagacagtgtcccaccgtcgtcttgaactcctgggctcaagcaatcctcctgctttggcctccagggttggagtgctgggatggattacagacatgagtcaccgtgcctggctggcacttcaaatttttgtagatattttcatgcaggtagggttttctttccctttcttttcttgtattattattgttttttccccctttccttcccccactcactaaagggtgtgacttaagagtatgtcgagtagggtcttttgtctttgtttccatggccttctgttctggcagcaggttgtatattgggctgtggagttcaacctacgggccagtagatgatgcttacgggtgagagtcagctgtggtggaagcagacagttatgtacttggtatttgtttactgtgaagaactctctgttgttccaggtgataggctagactgtggagggctgcataccatgtacttcctattttacgggagtgctggggacatagctgggtagagtggataacctggcttgtccacaaatacccctatgtcaaatgtagaagtgtagtccccaaccctgatgagggtggctaggaaaagctcccagtgaattgtgccacagtctctgtgggggtttggggtgctacacaagccccttctagatagactggaatgtagattgttgcccagtcacacccttgttctagagctcttgactcctggatcagacacacactgcagcctatctccagaccaccatgtggttgagagccttaggaaatgtctaatttttgactctccaggggagtggtttttggggcagaacttcatcacttagcttaatataggtagctgtgtggctcctctgctctccaatgtgatgactcttcttcatttaagagcggggttgggggactccttctttgggcctctgcaggggtgtgttggttttggtggtgttggctggttgcgtcggttcaacctcaggcaatgggagatgtggtaaagtactagcaaaattggaatagggtagggagatctgtaagtccctagttagtccctagatggctggctggacttcctctatgagtcttgatggggctggattgttggggagcctcaggtcctggctgtgatgggaaggggtgagggctgatatctgggtgaggggctaaactctcaggcagggcacttaggcggtgggagccctagggaagatcacaggtctatgggggtaaggttttcgacagggctttgggccatgactgaaatgctcatgtaggggtcggctatgtgcagtagaagccagaaggcagcagtcctggttggggagtgggcagtggaggaagggggtcatgtggaaagcattctggccacctctctgaagggtagctgctggcactggagtttctctccccagcctgggggcagcaggggtggccacggcagaggacctgttcagttgcctttgggagtgatggtgatggggggtgtacctgggaagagggaatggggagcaggttgggtactcctctctgctgatggaggtgcttgaaagcacctttgttccctccctagcctagaagtagcaaggatgggtactgcagcagctgcagtggcagagggcctgtcagttgcctttggaagctccaccctagagaaacagagctgctactcactgaagtgattatgtgggggtaggggtgcctgtgctggcggcccaagtcaggaggccctgccctgtaaggagcagcaggggctgggcctctgagagcaaagagtctggccacctttcctgaaggcagctgcatcctgctggaggtctacttactctcaaggcagctgcatcctgctggaggtctacttactctcaggctcttcactccctccccagcctgagagcagcaggagcaaggacctgacagaggcagttgcagtgggcctgtcagttacctccgggagctctgacccagtgaaatacagagccagagccgtgaccgactgaccagagtgctcagttggtggtggagtgggcgtgctgggggcccaggccagtggccttgcctggcaaggaacagcagaggcagggcctgcagtctgactgctcctaaactccatggatatggcttctatcctagagctacgcgaaaaaacctggcctcccttggtgggactataacagctggcaccagggaactcggggatccaaggttggtggggatccccgactccatgtggggttgagcttccaagaagtcttccttacatggcttatatggctgggaagttggtcctggctgttggcagttctttgcgatgtgaacctttccataggactgcttgagtgtcttcatgacacaacagctgactttctgcagagtatgtgatccaagagtacagggtagaaatgacaatttctttttaagacaaagccttggaagttacataccatcatttctgcagtattctattagtcacagacaaacctgatacaatgtgggaggagactacagaaaggcatggataacaaaggtgagcatcattgagtcttagaggccgcctaccactgatatatgcatgtgtgtaaacatatgtacgcatgcatgtgtgtatgtgtataattaaaaaaaaaactttatgaccattctgttctcagaaatgttgtagtaggcagaatttcttaaatggcctctcaaagatgttctgccctaatccctggaacctttgaatatgatgagatgtcactcccatgattattatatgttatatggtatagttgactttaagatggggagattatttggatctaatcatatgagcccttagaagtagtgagctttctctggctgttaaaaaggggaaggaagaaaagcttaaaacccaagaaggactcaggatgccattgctgccttgaaggtggaggggccatgattaaaggaatgtaggcagcctctagaagcagtgagtggccctgagataagagcaagaaaggaacctcagacctagagctgcagagaaatagatttttgccaacagcttgaatgaacttggaagttgattcttactcccaacctccagataagagtccagctcagctgagatcttgatttcaaccttgtaagaccttaagcagagaacctagccaaccctatctggacttctgacctgattgtctctgatttatcctctgctgcttctgctttaggaatgaatagcacttctctacttccacttttcatcttggtgttgtaactgaatatataagtatacccagattcagtgacattcacataagtcaaaactgacttgcagtgacataataaatggatgctgttcaagctgccaagtttgtggtaatttgttatgaagcagtagagaactaataaaatacaggtgtcagtgaaggtgcctaattaactgcattgcacagtctttgtttctggttaaaaggtcaagcctagtgtcctagatagatgtcagatagatctggtgggtgggtggggtaaggcaactgattgaatgaacttagagtggatctggagattgagagagtaagaatcaatctggaaatattttgctgtcatttttatagtttctctttcctgactttaacttaaaaatttcctaggttatttatcatcagttttgacttacgtgaatgtcactgaatctgtgtatgcttacatattcagttacaacaccaacatgaaaagtggaagtagagaagtgctattcattcttaaagcagaagcagcagaggagaaatcagagacaccaactctgcggacctgctgaaggaagtgaactacagggcattgttccattccctgagaacagcaaacaccttaaagtttgtattatgtggagatcaaatcagttcggtagccttctcatatgagataatatagatcagtgttcctcattcattttttcattattgtctcctaagaagcctttttaacaattttttcttaaccacaccctccaatgaagtttttctaccacacatatactgtatatctgtttttgtactgtataaatatctgtgctttatacataaaagagtaaaatcttccccttcctccaaaacaacttttacccttggggttaatattacccatgctgagaatgcataagatagatgctattgtgaataggtaaaattaaagttatatttaaagatacaggtgaggtgcagtggctcacgcctgtaatcccagcactttgggaggccgagatgggcagatcacttgaggccaggagtttgagaccagcctgcccaacatggtaaaaccccatctttaccaaaaatacaaaaattagctgggtgtggtggcatgcgcctgttgtgccagctacttgggaggctgaggcatgagaatcatttgaatccaggaggcagaagttgcagtgagctgagattgcactactgcactccagcctgggcaacagagtaaggctccgtctcaaaaaaaaaaaaaagtattcagagatatcatcaaaaaaggtattttcagctaggtgtggtggctcatgcctgtaatcccagcactttgggaggctgaagcagaaggatcgcttgaggccaggagtttgagaccagcctgagtaacatagcaagaccctagctctacaaaaagtaaaaaaaaaaaaaattaggtgtggtggtgcatgcctatagtcccagctacttaggagactgaggcaggaggatcacttgagccaggagttcaaacctgcagtgggctatgcttgtgccactgcacttcagcctggggtgagatcctgtatcttaaaaaactattattttcatactgtaatataatctagagtacaggaccagagaactcagttcaacacagagagatgtaatatctgcatagttattatgcctggcaaagtttttgtatttttagtagagatggggtttcaccatgttagccaggatggtctcgatctcctgacctcatgatccacctgccttggcctcccaaagtgctgggattacaggcatgaaccaccgcgcctggccagcatcttagttttttcttggaacaattactattatagttcttttttttttgagacagagtcttgctctgttgcacaggctggagtgcagtggtgcgatctcggctcaatgtaagctccgcctcccgggttcatgccattctcctgcctcagcctccccagcagctgggattacaggtgcccgccaccacgcttggctaatttttttttttttgtatttttagtagagacggggtttcactgtgttagtagccaggatggtctggatctcctgacctcgtgattcgcccaccttggcctcccaaagtgctgggattataggcttgagccaccgcacccggcctattatagttctttttataattggcaggattagctgtggcctacatgatcacaggaaataataaggcaggggttgtaaactcaaatgcctataagcacgagccatgtaacagaagtacatgaaacagttaagtgtaagacatagatatttattagttgattttagctgctgacaacagcagcaaacatttatttttttgctcatgggtctccatgtctgcaaaggtggatcctgtcttcttcaggctgcagtgaggttcagatgtgccccacaagttgtaacagcagcaggaaaaccagagagagatttcaaatggatgttccttgagtacagtctgctgacattcatttatcctgccctatgttttgaaaggcagataactaggcctctgttctaatacagacatttagcatatgcggttgattggaccattgttcccaattcttcacttactctctaatttagaaataaacattctgctctgtaatggtttactagagtcttttatgtggcacatgttcaataactgctgttaaatgaatgattatatcccttaatactgtttgatttttgttaatggtggaacttggggtacttgtcatttccattccctcctgctttttctgctcttttcccatccctactcttcctctctcccttcccatttacttccaaaacggcagctgtcaatatgaaaaaggagggagtggtagagagaatccaagacataaactcttccacatgttggtgtaaagtaatttaagatcaaggtttctttcacaaggcaaaatgcaatgcaacctggcctttctgagattctttttttttttccttttttatggttttggctttaggatttagaatgttagttattttaaaaatgaattttgtaggtctgaagacctactcatatttctacataattgttgagcaaacggagacaagtagttagatgctggaggtcattaaaaaatattttttaatgaagcttttttaaaacatgctcactggtttcagatcagagccaggcatccttaaattgtcttctgccaggtattggcttggcagattaccctgtccagttgccctcatcttgaatgtgaggagagttaacttgataagattttaggtcctaactggaccagattttacattcctctcagccatgaaaagtttaagatgagcaggcttcatttttactttagtacaattagaccttttcttgggaacaattctctttcctcttcaaaccaattattaacattttcttccttgctgatatttgagtgatattcactactgactttttttttttttagttcttttacatttctcaagcaggttgttgaaactttggctctaactatatgaagtgaattgtttttttactggtgttttcgctgtgtaaatattgtattcagtctgagtttacaagaagcaaataacttagcctattctggtttggcatgttttctctttctaaccaccattggggctgaagctgggaactgaacacaacttgaaattttgtggtttgggtgctagaattcagagctagactatctgaagctaaaaattattaatgttgaaatgttttcacccactaaataaacctgaaaaaaaatgaaatgtaactccaggcagcccataaaatcgcatatggtataatttttttgagtctaggaagagatgaaaaaaatttgtgagcaggatctgagattgttaaaaaaaattagaaattgtttattatggtttaaagtaaatgctactatccaaactctaatccaaactcaacaaacaaacccagaaatctcttactgttattcacatgatgttttattttctccaagactatactgaatcagtacataaaaataatgaagtagggaaaatgccagttgcccttgtttaacttttcagctattttttacatgttttctttaaagatagaatagtaaagtaatactttacattttcaaggtacttgatacttcactgaatatttccaaatatatcatcttaattaaaataatggcttgtttcacccttttaaaaatcacaaagcattgaacagttttcagctcattaaatctgagaacatatccaaaacttggcacatggatagtatgtatagaaaggctagtcctttttcctctgctagttagcactctaatgatattaatgatggaagatttttctcagcccctttgctggacttatgacaggggtatcccatttactcggcccaccatgctcaacctcttgcgggagggagcacgtgagtgagtgagtgcgggatctggctggctgttccaggcacttgcaggagcaagcttcatgtgctggtatgagtgagcaagtgcgggatctggccagcacagctcggagtgccagcaggagcaagctctgtgtgggatccgcggccagaccaggcatgagctagcgagtgtgggatccggccagccactctgggagctgccaggagcaaactccatgaagggcccgtggaggcacccaggtaagggtgcctgtgaccccgaatccccagagtgggtgttacagtactctcttagttctgccctctgcggacggtggtgtgttagcagctcagttggccccttacctcgttatgtggggcagttgccctctgctggtgagggcaaagggccagcgtgacagccttctgggtacccgcacttggtgggtccctgtctggcatccaagaagaatgaggtcagttggacaattgacggatggtgaaggcagataattttattgagcgatgaaaatgactctccgtggagaggatagctagagaggggacaggaagggcaggtcatcttccctaaagttgggtcatctcttccccgaagtccagctgtcttacccaaagtctggccatctcccttaaattccggctgtctccggtattgattgagtttgggttctttataggtacagaatggggagtgcatgctgattggtttgcaattatgcaaaaaattttaaagcaaagacaccactcaaaggtgggcgagacagtgtggaaaacgaattaggaaagggtaggtatacgtaaaataggtgaagggtgaggatcagtccagaggaaagcgtgccaaacaggaagacaagttctcactctggtccagggatttaacatatagcttggctttcaggctttgaactgtatccggcttggaggtggggtttcaccggatacctggccctaccctatctgcctaggcatttcactgcctcctgtcgctatcattagtaagcataagcatttctttatttcaagatccactttcaacttttactgacagaagtttcccttgccctgatatctggtgactaatttgatccatgttgtttttgaaaatgaagaaagttccataaaaatgtttagagctctgaatttagactagcattctccaaagcagggtatgtaaaatgtttcattaggttgtgggaagaaaatattaaaacttttattgtttcaatctaacaaatgaaatttaccttaattaacatttaatcaatggatcaacactgacatcctcacttggtctgggtgtcagactgttgggtatcagttatagtgcatgaggaaagcatgcaggggttgacagaggccccttgcttgttattttcaacatactgggatgaattataagtctgcatatatctagttaggtggatttatggatttaacaaaatcaaagttcacaaaacagataaatggcaagaaagattcctgcaaagaaactaaattgtgtgcaatactaataatgagagtggaagtgagccacacacatgtataggtcagagcggatgcttctcctatgagacattaatgttgaagtaaaaatcaacaacaatctaatctcagctgagaagatgtccagaaaaagtgaaattataagcaagacaatttgatagatggaattgtatccactattgttaacaaagaaacactttctgatattttattcccttgaaatactggctaacaatagtaggaagccatcataattaatgaacatgtgggacaggaagttaaactgacaaaagtttttccatgacatttaaagttatgtgacacataactcagtatctagaaaaatgtcattaaaataaataatagatatttaaaagcatcttttgtgttttcttaacagcaaaagaccaaatacagtacattattagtaacattagggacacacttgttcataaaatggatgaaataaaacataggaaacaatatggcaacaagttaaatgaatttttttttttgagcgaagttttgctcttgttgcccaggctggagtgcaatgacgcgatctcggctcactgcaacctccacctcccaggttcgtgcgattctcctgtctcagcctcccgaggagctgggattacaggcatgcaccaccacgcctggctaattttttgtatttttagtagagacgaggtttctccatgttggtcagactggtctcgaacttccgacctcaggtgatctgcccacctcggcctcccaaagtgctgggattacaagcatgagtcaccgcacccggccttaaatgaactctttcatgaacaaatactttgagaagttgcatagaaatctttgaagatgatttgaatcattgagaacttaaattatttaatgtgagaggatgctatatatttgaagtacagatgtttctaacaaggctcagattatcatagtagctatattttgtttcaataatgaaatacatgaagaactaatttcattttgtgccattaaaataaagatgtatcagggaagatatattcttgaaaataagtgactttatgaatacaaaacaatgtatatgagagaatttcctgggataacgatagtgttttgactttgtaagagtttaggttgcatacatgtatgcacttgttcaagtttatgaaatggtagacttataatttgcacatttcattgcatgtagaatttactgcaaaaggaaaaaaaggaataatacatgttaaattctagttaatgctatgcatgctggactgttgggggaaactatattaatgtgtttaacttactttgaaatgcattaaaaaaaccctaagatggattggtgaatggattaatcatacagaaagcatacagtatagtcatagtatagtataacaaatacagtaaaaattttaaatgcagagtctaagtggtgggtatatggatggtccctgtaaaagtctttcaacttttctgttgcatcatccttaggtaatctatagcaacacataggttgatgtcagatatgcaaagagagtatttcagtatggtattaatgttgttaatttttcttaaaatctgactgttaggctgggcatgttggctcatgcctgtaatcctagtactttgggaggccaaggtgagaggattactttagctcaggagttcaagaccatcctgggcaacatagtgagaccttgccactacaaaaaataaaaaattacctgggtatggtgatgtgtgcctgtagttccagccgcttgagtggtggaggtgggaggattgcttgagccctgaaggcagaggctgcagtgagccgtgatcatggcactgcactccagcctgggtgacagagcgagaccctgtcacaaaccaaaacaaaaaaacaaaaaatcctaactgttgtatagaatccctagtgtactctataatgagatgagaagtgaccatgagaatcatttgaatcacaagagcatctctgattatcttacagcaaagactgtaaaagaatcattgaacttaaaagatgggttagctgggcatggtggctcatgcctgtaatctcagcactttgagaggctgaggtgggtggatggcttgagtcctggagttcaagaccagcctgggcaacatggtgaaacccagtctctatgaaaaaaaaagctgggcatgtgtgaatttgaggccacttgcagtaagttatgttcatgccactgcactccagcctgggcaacagagtgagaacctgtctttaaaaaaaaaaaaaaaaagatgggtgaagcatgtttttttaaatgaaaagacaagagatgtcaaatttgctgacccttttttgtatgacaagtgactatgtaatctgcattgcagattaaacaccaagcaaccaaccaatcaatgcaacactgttacttcatttcttcaaggtaaaggtaatgttttaacaaggagtgaaaatgtaactgccttttctaaaggctgggataaaaacacagaatgtttttaaaatcactgtttggaatatttcttttatcatgtgatttttgttgtcaaagatatgtgtgtcttatgaaaatttatctgcactcttaaaaaatacttggaaaaatattttgtatactcttcaaaaatgttacaaatagagtttcagtcagtgggggggaagggggaataggggaaggagagatgttggtaaaagggtctcaagtttgttagacagtaggaataaattttggtgatttattttacagcatggtaactatagttagtaataatgttgtatatttcaaattgctagaagagtagattttaaatgttcccaccaaaaaaaagataagtatatgaagtgatagatatgttaattagcttgatttaaccattctacagtgtactataaacatatttcaaaatatcatcatattgaactccataaatatatattattatttatcaattaaaaatattaaaacaagcaaaacccatgatacatatctggtggcaaatgagtatcgtggtagaaattcatcaaactgctcagatgtgatttgtgtacttttctggctgatggtcatacttcagtaaaactaaataaatgtaagcaaaaaaaaaaaaaagtttcagtgggtttttaaaccagttgttaaaaatgttaaaatgtgacatgttttgattcgtctgccagaacaatcaattgacgtgaaggaagatcaataaaaacttttgcataattgatggaaggtattgaaaaatgcaagtagtaatttagttaagtccaacaaatgatgtatttctttaatttcaatccttgcatctttgtaattatccccttctcagcttacaattaagtactgaaataagtggaacttaggacctgacatttcaatcaccgaatcacaaaatatttacattattattttttaaagatacaatttggcttattattttcattattatcattgctctacttaaaatggtaagcttttatgagagcaaacagatcttttatataagtaataaatattataaaatgatttttaatgtttataatttttaattcatactttgtgtgtgttttatactctataggacatattagtaaaatagtatgttcataataaatatgcatatattggagggctgtactaaattttgttttgattgctttttttggctggtttgttggggtatgtggtcaaataagtttggagaactctctttactgatctctcataatctggcaagctattattgacaggagtaattatttattcttaaagtctaaatgatcattgtaaagattataaaccagcatatagttttaaatatgggaattttttttttttttttttttttttgagacatggtcttgctttgttgctctggctggtctagaactcctgggctcaagtgattctcttgcctcagcctctgggattacaggcgtgtgctaaacatttgtgttttaaggttgaactttgataaatgaagtttacctttagaccaaattctgaaacagtggttctcaaagtatataataacatcagcattacctgggaacttactagcgatgtaaattctcaggccatgacccagacctactgaaccagaaatgctggttaacaagctttccaggtgattctgatgctcactcaaatctgagaaccacatatctagatgatttagactcatgaatcactcctacttatttcttcctacttcataatgtatctgagacagtttctttattgtatgtcttagttttagcccagacttttttccctctcttagatttttttttcttttcccttcctctcctctccccttcctctcaatgttaaaaaaaaagttctttagtgttattttcacaaagaaatagtgcattggttctaaaaatttgggcgccacaactaatgtgacaaatagcatgtgtttaaaggagatatttctaaacattttcaaattaattttgttaactactgtattagttcattctcacattgctataaagaactacctgagactgggtaatttatgaagaagagaggtgtaatcgactcacagttctgcaggcttaacaggaggcatggttgggaggcctcaggaaacttacaggggaagcaagcacatcttattatggcagaacaggagagagagagagacagacagagacatcttactatggcggaacaggagagagagagacatcttactatggcagaacaggagagagagagagagagaaagagaaagtgccacacacatttaaaccatcagatcttgtgagaactcactatcatgagaacagcaagagggaaactgccaccatgatctaatcacctcccaccaggccccctcctccagtactggggattacaattcaacctgagatttggatggggacacagagccaaactacttctagttacacttgaatatggatataattaatttcctattatttcctgtctatactcttttgatttcaacttttataatctcaaaatagttttctgccaatgaagatttcaaaacagacatttcaaagtaggaatcacctaaactcaacagttgtttataaagcaataaatttgctttatttctctttctacacacatatatgcacacacatacacatttttatttgctgaactgtttgaaaataaattgtgtacatcagtacccttcacccctaaatactcttaaaaatatggattaaagtagcccttaatgggactagtgcaacattgttttgaaatgctaatttttaacaaatgctcaaccatttattaaagactcttaaatattttaaggtcctattataaatatcttcatgaggaaaaggtatagaatgccaagttatgatggtataaatgagtgaatgtttcagcctttctcaactagaagtttctcatctgaactacaaaatacagtggatgatttgagtgactattttctcaattcctccaaggatggtacataactagtgccaattcagatgcagaggggagaagttaattcattccatacaatggatgtcttgggcttaattctctcctgggaacccaggttagttggactgcatatatggcaaagtcttaaaaggattttgctttgactggcttgtgatgtttatctaaaaaactttttttttttttttttttttttttttttttttttttttagattacaggtccaccaggttgtggaaaaactcagttttgtataatgatgagcattttggctacattacccaccaacatgggaggattagaaggagctgtggtgtacattgacacagagtctgcatttagtgctgaaaggtatgagattttattttctattataatgttttacttttgtaacttatatacagcatgaaacatttacacataggttaacatttaccacccctcccccttgccttttttttttttttgagatggagtcttgctctgttgccgggctggagtgcagtggcacgatctgggctcatggcaatctccacctcttgggttcaagcgattctcctgcctcagcctcccgagtagctgagactacaggtatgcaccaccacacctggctaattattctatttttagtagagacagggtttcaccatgttggccaagctggtattgaacttctggcctcaagtgatctgcccaccttggcctcccaaagtgctgggattataggcgtgagccactgtgcctggctttttttttttttttttttttgagatggagtctctctctgtcgcccaggttggagttcagtggcaggatctcagctcactgcaacctccgcctcccgggttcaagcgattctcctgtctcagcctcctgagtagctgggattacaggcgccctaccaccaggcctagctaatttttgtatttttagtagagacagtgtttcaccttattggccagactgctcttgaactcctgaccttgtgatccgcctgccttggcctcccaaagtgccgggattacaggtgtgagccactgcgcctggcctaaattggtctttttataaatgtatcccagtagtaaatgaataaggaatgatagaatatcaccaaattacaaactctgacaatctaatggatctaggcatttaacatcacaaaaagatgacgagtcactggggtactttctgatggaagaacaatcaaatttgaatgtgatcaaggcttcagatccagccaccaatttacaacctagctagagaagagaggaacacatcaaactgctctagaaaatgcaattagcagaatccaaactgtgggaaataacagaacaaacaacttggtttctgtaacaaataaattgtaagattaaaaaatagttggaaggggaacctttggattaaaacagatttaaaagccttattgatcaattgctgtgtgattaacttatttggatcttgacttaaataaatggttaaaaaaaagaacagaagaataaacattgagactactggaaatttgaacatgaaaatatatttgagattaaagctggtaaagactggttcactcaaattgtccaagtactctttaaaatgccaatgactagccttcgactaacaagccaagtaggtattaaatagccagttatgtcataaatagctaatgttcaaatagctcttacaaaggtcctggggaatttgggtaaagaattcaaagattaagattatttttataacagcagttcagttcactgtaatggatttctgctttctttgcaccacatacaaaacagagtttaggatgtcttcttaaggaggaaactgttgcatgttattttattaccagtattacagttcagagcagtgtaaaaaccttatcaatgaattgggtgatatcagcatacatacagaagactagcaggtgacttgtctgcattttccaaatgaatttgtggagagtcttatgttttttgtctttgcatagagccttaattatttactttttgaatcccccatatttacttatttctccttcatatctttttctgccaatgtgcatgttggtatttacatcagaggcaggttggaaaatgaagaggtaatattttagctcctttgttggaattacgttgcatagttcacaaggagctcttatgaaggtcatttgagaataggggttgaactttatattgtatttggttttttattccattctccacaaggcttaaaatgagtgatcatctggctcacacatggaatggattttgaggtctggtgatagggccaagtagaataaaaaatatgaatgctctccgatatatatgccagatttggcattcttatactaccttctagtttgtcatggtgggtcatagaatggaactggccctgtagtgtctgatcacatttcattcattctgttacaggacagcttaacccctatttggaattatcaggaaaggttggccaatcggttaggaaagcttactgctgcagataactgagtatccaaagaacagtagcttaaacaaaaagaggtttatttctctcatataacaagacctgagtaggtggttgctggcactgggtcactcaggtctcagtgatgacagagagacctagggcatgcacattttcagacatcggattcattctgtgctcaagtcagtgtgaagaaaaagggccagctatatcttttatcaggaaagtgtacttttattcataatatctgcctcctcccatctgtggatttcctttttgttgcctgtagtcctcttgtagatttctcactgagtcacctctatatgtaaaaagaggctgggaaagtgaggggagaagatcgtcgtaacaatcatgatgagttgtctggttaatattgctgcctgaataaaactggggctctcatagcgaggaagaagtggaaatggatattggattggtaattaacagtttctgtcccagccccagctgtttctggacttagagaagaggtaaggcagggaaatatgagacgcaaaaaggactatgttgtagctctgtatgtgttcacattgtctccactttgtgcttgcaaagctagccggctaaccagcacaaatgagaaagtgtttaaaggattaatatgatgaaggattaaaggattcacatatatagaatttagggtacgtgagaaaaagttgaaaataatttcttcctataaatatctagatatctttttactaagaaggagagagaaatcaaaggaggaataaatacaaactacttaggtttaaaatgtattaaagagggaggagccaagatggccgaataggaacagctctggtctacagctcccagcatgagcgacgcagaagatgggtgatttctgcatttccatctgaggtaccgggttcatctcactagggagtgccaaacagtgggcgcaggtcagtgggtgcccgcaccacatgcaagccgaagcagggcgaggcattgcctcactcgggaagcgcaaggggtcagggagttccctttccgagtcaaagaaaggggtgacagacggcacctggaaaatcgggtcactcccacccgaatactgtgcttttccgacgggcttaaaaaacagagcatcaggagattatatcccgcacctggctcagagggtcctacgcccatggagtctcactgattgctagcacagcagtctgagatcaaactgcaaggcggcagcgaggctcagggaggggcacccgccattgcccaggcttgcttaggtaaacaaagcagccaggaagctcgaactgggtggagcccaccacagctcaaggaggcctgcctgcctctgtaggctccacctctgggggcagggcacagacaaacaaaaagacagcagtaacctctgcagacataaatgtccctgtctgacagctttgaagagagcagtggttctcccagcacgcagctggagatctgagaacgggcagactgcctcctcaagtgggtccctgacccctgacccccgagcagcctaactgggaggcatccctcagcaggggcagactgacacctcacacggccgggtactccagcagacctgcagctgagggtcctgtctgttagaaggaaaactaacaaacagaaaggacatccacaccaaaaacccatctgtacatcaccatcatcaaagaccaaaagtagataaaaccacaaagatggggaaaaaacagagcagaaaaactggaaactctgaaaagcagagcgactttcctcctccaaaggaacgcagttcctcaccagcaacggaacaaagctggatggagaatgactttgacgagctgagagaagaaggcttcagatgatcaaattactccgagctacgggaggacattcaaaccaaaggcaaagaagttgaaaactttgaaaaaaatttagaagaatgtataactagaataaccaagacagggaagtgcttaaaggagctgatggagctgaaaaccaaggctcgagaactatgtgaagaatgcagaagcctcaggagccgatgcaatcaactggaagaaagggtatcagcgatggaagatgaaaggaatgaaatgaagcaagaagggaagtttagagaaaaaagaataaaaagaaatgagcaaagcctccaagaaatatgggactatgtgaaaagaccaaatctacgtctgattggtgtacctgaaagtgacggggagaatggaaccaagttggaaaacactctgcaggatattatccaggagaacttccccaatctagcaaggcaagccaacattcagattcaggaaatacagagaacgccacaaagatactcctcaagaagagcaactccaagacacataattgtcagattcaccaaagttgaaatgaaggaaaaaatgttaagcgcagccagagagaaaggtcgggttaccctcaaagggaagcccatcagactaacagcagatctcttggcagaaactctacaagccagaagagagtgggggccaacattcaacattcttaaagaaaagaattttcaacccagaatttcatatccagccaaacaagcttcataagtgaaggagaaataaaatactttacagacaagcaaatgctgagagattttgtcaccaccaggtctgccctaaaagagctcctgaaggaagcgctaaacatggaaaggaacaaccggtaccagccgctgcaaaatcatgccaaaatgtaaagaccatcgagactaggaagaaactgcatcaactaatgagcaaaataaccagctaacatcataatgacaggatcaaattcacacataacaatattaactttaaatgtaaatggactaaatgctccaattaaaagacacagactggcaaattggataaagagtcaagacccatcagtgtgctgtattcaggaaacccatctcacgtgcagagacacacataggctcaaaataaaaggttggaggaagatctaccaagcaaatggaaaacaaaaaaaggcaggggttgcaatccgaatctctgataaaacagactttaaaccaacaaagatcaaaagagacaaagaaggccgttacataatggtaaagggatcaattcaacaagaagagctaactatcctaaatatatatgcacccaatacaggagcacccagattcataatgcaagtcctgagtgacctacaaagagacttagactcccacacattaataatgggagactttaacaccccactgtcaacattagacagatcaacgagacagaaagtcaacaaggatacccaggaattgaactcagctctgcaccaagcagacctaatagacatctacagaactctccaccccaaatcaacagaatatacatttttttcagcaccacaccacacctattccaaaattgaccacatacttggaagtaaagctctcctcagcaaatgtaaaagaacagaaattataacaaactatctctcagaccacagtgcaatcaaactagaactcaggattaagaatctcactcaaaaccgctcaactacatggaaactgaacaacctgctcctgagtgactactgggtacataacgaaatgaaggcagaaataaagatgttctttgaaaccaacgagaacaaagacacaacataccagaatctctgggacgcatttaaagcagtgtgtagagggaaatttatagcactaaatgcccacaagagaaagcaggaaagatccaaaattgacagcctaacatcacaattaaaggaactagaaaagcaagagcaaacacattcaaaagctagcagaaggcaggaaataactaaaatcagagcagaactgaaggaaatagagacacaaaaaacccttcaaaaaattgatgaatccaggagctggttttttgaaaggatcagcaaaattgatagaccgctagcaagactaataaagaaaaaaagagagaagaatcaaatagatgcaataaaaaatgataaaggggatatcatcaccgatcccacagaaatacaaactaccatcagagaatactacaaacacctctatgcaaataaactagaaaatctagaagaaatggataaacttctggacacatacactctcccaagactaaaccaggaagaagctgaatctctgaatagaccaataacagggtctgaaattgtggcagtaatcaatagcttaccaaccaaaaagagtccaggactaaatggattcacagccgaattctaccagaggtacaaggaggaactggtaccattccttctgaaactattccaatcaatagaaaaagagggaatcctccctaactgattttatgaggccagcatcatcctgataccaaagccgggcagagacacaaccaaaaaagagaattttagaccaatatccttgatgaacattgatgcaaaaatcctcaataaaatactggcaaaccgaatccagcaacacatcaaaaagcttatccaccatgatcaagtgggcttcatccctgggatgcaaggctggttcaatatatgcaaatcaataaatgtaatccagcatataaacagaaccaaagacaaaaaccacatgattatctcaatagatgcagaagaggcctttgacaaaattcaacagcccttcatgctaaaaactctcaataaattaggtattgatgggacgtatttcaaaataataagagctatctatgacaaacccacagccaatatcatactgaatgggcaaaaactggaagcattccctttgaaaactggcacaagacagggatgccctctctcaccacttctatttaacatagtgttggaagttctggtcagggcaattaggcaggagaaggaaataaagggtattcaattaggaaaagaggaagtcaaattgtccctgtttgcagacgacatgattgtatatctagaaaaccccattgtctcagccgaaaatctccttaagctgataagcaacttcagcaaagtctcaggatacaaaatcaatgtacaaaaatcacaagcattcttatacaccaacaacagacaaacagagagccaaatcatgagtgaactcccattcacaattgcttcaaagagaataaaatacctaggaatccaacttacaagggatgtgaaggacctcttcaaggagaactacaaaccactgctcaaggaaataaaagaggatacaaacaaatggaagaacattccatgctcacgggtaggaagaatcaatatcgtgaaaatggccatactgcccaaggtaatttacagattcaatgccatccccatcaagctaccaatgactttcttcacagaattggaaaaaactactttaaagttcatatggaaccaaaaaagagcccgcatcgccaagtcaatcctgagccaaaagaacaaggctggaggcatcacactacctgacttcaaactatactacaaggctacagtaaccaaaacagcatggtactggtaccaaaacagagatatagatcaatggaacagaacagagccctcagaaataatgccgcatatctacaactatctgatctttgacaaacctgagaaaaacaagcaatggggaaaggattccctatttaataaatggtgctgggaaaactggctagccatatatagaaagctgaaactggatgccttccttacaccttatacaaaaatcaattcaagatggattaaagacttaaatgtaagacctaaaaccataaaaaccctagaagaaaacctaggcattaccattcaggacataggcatgggcaaggacttcatgtctaaaacacttaaagcaatggcaacaaaagccaaaattgacaaatgggatctaattaaactaaagagcttctgcacagcaaaagaaactaccatcagagtgaacaggcaacctaaaaaatgggagaaaattttcgcaacctactcgtctgacaaagggctaatatccagaatctacaatgaactcaaacaatttacaagaaaaaaacaaacaaccccatcaaaaagtgggcgaaggacatgaacagacacttctcaaaagaagacatttatgcagccaaaaacacatgaaaaaatgctcaccatcactggccatcagagaaatgcaactcaaaaccacaatgagataccatctcacaccagttagaatggcaatcattaaaaagtcaggaaacaacaggtgctggagaggatgtggagaaataggaacacttttacactgttggtgggactgtaaactagttcaaccattgtggaagtcagtgtggcgattcctcagggatctagaactagaaataccatttgacccagccatccaattactgggtatatacccaagggactataaatcatgctgctataaagacacatgcacacgtatgtttattgtggcattattcacaatagcaaagacttggaaccaacccaaatgtccaacaatgatagactggattaagaaagcgtggcacatatacaccatggaatactatgcagccataaaaaatgatgagttcatgtcctttgtagggacatggatgaaattggaaatcatcattctcagtaaactatcacaagaacaaaaaaccagacactgcatattctcactcataggtgggaattgaacaatgagaacacatggacacaggaaggggaacatcacactctggggactgttgtggggtagggggaggggggagggatagcattgggagatatacctaatgctagatgacgagttagtgggtgcagcgcagcagcatggcacatgtatacatatgtaactaacctgcacattgtgcacatataccctaaaacttaaagtataataataataaattaattaattaaaaaaatgtattaaagaaaacaagaagaaaacccaggagatgatatacttaaaagcactttggaaaggtcagttctatttttagaagcaatgcactaaccaatttattttacatgtcttttagaagatagtaatctaaaatagttgttaatcatgcttgttcatcatagactgcaattgtatctccagactatttaacaattttaacaggtttgttgaacccacagcccgtgggccgcatacagcccaggatggctttgaatgtggcccaacaaattcataaactttcttaaagcgttatgactttttttgtgatttttttttttaaagcccatcagctatcattagtgttagtgtattttatatgtggccctagacaattctttttcttcctctggggcccaaggatatcaaagttggacacccttgaattagataattgtgtagcctggcgctaaccagactgagttacagggactgccttggggagaggggaatgctattcaggcaaagatctagatcctcttctgattgatccagagaagatctgctgtttttttgttgtttttttttaacctactggacttctgcttaagatctcatatagtcttaggcaccatatgcttgtatataccttgagaatgtagataaatagattaatccagtgacccatccccatattctagtctatgaaaattttggcaaccatgagaattccagtttacatgaactgaattaacaatatattgtccgtattagagacagttacaaaaagatggaactgtgggttaagaataaaaaatgaaggtaatatggatggcaaatagtaatagaagtattgaaataatgtttttggagaaataaaatggataaaggaaagtaaagttgggtcttagaactgcaaattgaaggggatcaataagcatgtgagaaaaactgagggatgtagggaagtaagagatgagagccaggactctggaaggtgggaacctgaggaggtaggatataggactggaattttaggaggtagaagtggatattcctgagttgtaatgaaatcagaaaagctttgaaaattgggaagacaattagtccagcaagggaggaagacattaatcaaataatcactaaaatgtgaaattgtaaatattataacttagtatacaaaggagaggtacttgtattggtagtgtgtgggagcaatggctaagcttagatctgaggaagctgctgtatttggtgtgcatgtcacctctcagggtgccaagttccccacagatagttatctttaacacctagcaaactacagtcatgtgctacataacaacatttcagtcgaggatggattgcatataagatggtggttgcataagattataataccataatttttctgtatcttattaaagtttagatacaaagatatttgtcactgtgttacaattgcctacaatattcagtacagtaacactctgcacaggtttgtagcctaggagcaataggctataccatatagcctcagtgtgtagtaggctatactatctaggtttgtagaagtacactttatgatgttcgcacaatagtgaaattgcctaatgacacatttctcagtacatatccccattattatgcgccatacagctgtatttagagtgtcattctttctggatttgtatataaaattggaggcatagcagggagtggtagtggccagccatgactcaggctgattctgaaggtaataccagtgtggtcttaagaccattgacatattgacatatttgcttgttggtataaatttggaatctttgacccagaaagaaacaataggggagataaattccctcttaatcatttttttgagatagtttcatgacactgggtaggttttcctcagttcagttccagctgccttatcatttgtgaatctaggtgaattagtggggagggagatcctgaaaagtttctcagatagaaagtagaattagtcataagtacttattactgtaacaaaggtttggaatattctggaatctgtaatgaattaatagattcatatcattatattcagtaatatatattgaatgatgaatgaacagagatatagtacgtatgtacaagaagctttgagaagcaataagcctacattttagcatatttatgatgctacattttaactaagattttggaaaactttttacattaagcgtatgttttatttcaagttggcatgtggtcactaatgaaaagcttttatttttccttttatataagagctatgaagtcacatagggaactaataattttgtacagggttttgctccttaattgacatatgccttttgattctggaactgattacgaaagaagtctatctgtatccatgagcagttaactctttccagaattggaatctttaaagtgcattgtagctatcaggtccaaattaaggcatagatagtcacttgccaggtgagatttgatggcaaaagaaaaactaaaatgtggcctagaacttctttttcttttaaaagaggagcacttctaaccattttctgaggcattctaccacagtaaatcctttgattgtgggattgatagttagcattatttgtgtatcagaaatgagtcgttctggcagtgggacattgagagtggatgtagggttaggctaagttagatgatatggaaggggaagttgggaagtcggtggtgttttacctcaggacatctccactagcaattgatatgcaaatgattcatccagggagggaggagattttagaaataaagctcttaataggttttcagggatattgttttggggtttgatggactaagagtataaaggtagcttttctgacagcatggccctttagaatggtactacctccattttatgaattagtagttatcagttgagggagtaaggcagacagtttcccctttagtaggtattttgggaatttgtaggggggtgcaagaagaaattttttttttacagtaataaatagatgtggtccagggatgctagccattctgtaatgtgagggtcattaagactgataatgctataaataatattttataaattagagcattttgcagcatgatataattgacattcatctcagttgatgcatacagcagcactgtcaggtaaggagcggggtattatgatcttcattttagaaataagcaaaatgggactcagaaaccatgtgatttgcccaagatcatatggctaataagatagctgagaggtgaactcatatcctctttccactgaactgtggttggaaaaaatgattgactccgagaaaagatccaagtagtgttttcattcattcattcagtaatgcctgtttgacatttgggctttctgtctatgaatctatctttatcccatttcccattgggcttctagtctttttattcttgatttgcagaagctttttgtgtgtcttctagatattgtttgtcagttttacacattgaaaatatctcctcctgctctgttatctgtcatctttgtagtgtcctttattgaagagaaatttataatttaaaaaaatttattagagacgaggtttcactcaggctagagtgcagtggcacaatcatagctcactgctgtctcgacttactgggtacaagggatccccttgctttagcctcccaaatagctgggactgtagacgtgtgctaccacgcctggctaattaaaaaaatttttttgtagagctggggtctcaccatcttgcccaaactggtctcaaactcctgggctcaagcagccctcctgcttccgcctcccaaactgcttgaattccaagcataagccgccatgcctggccagaaatttgtaaatttgaagttgttgcctaatggtattggttttcagatcttaattaacaagttttcccccactattagttatcaagatattgtcttacagttttttcctaatatagttatagttttatcttttatgtcaatatctttaatccatcagaaatccattaaggatatattttaaatttttgtataaactgccacattctcctctagaaatattttacataattgtatctcaaccaatagtactttgagagccttcatcactgtttttagtttctttaattttgtcatacttgcgggaaaaaagtgatagctcattgttttaactattgtgaaccaacatcttttcatatattcattgtccatttatatttctttggcaaattacctagaaatacactttgtccattttttcttattgatatatataaatactttgtgtattatggatatttatgtttatatgatttttttcctgggctataattctataatttatctttcaactttggttatgctatcttttgttatctatgatttctttggtggttgatctttcagattttgctttatggctgtagtttttaaagttttaattttcagggcccttaaactctaggtggattatatcaattgatatttatcatattaggaatttaaactggaaaatttaaagaatatttaactattatctattatgcagtaagtccattacatggtatgtgtttttttgtgtgtttgtttttgtttttgagatggagtctcactgtcgccgggcttgagtgcagtggtgtgatcttggttcactataacctccacttcctgggttcaagcgattctccttactcagcctcccgaatagttgcaattacaggtgcccaccagtgcgcctgccaccatgcctggctaatttttgaatttttaaattaaagacggggtttcgccatgttggccaggctggtctcgaactcctgacctcaagtgatctgttcatctcagcctcccaaagtcctgggattacaggcgtgagccactgtgcctggccattacatgttagcatattgtaccaaacagggctccattaggaaaatagaaccagtagaacatatattaagagagttattgcaaagaattggcatatgcagatgtggagttgtctgaaatccatagggcaggctgttggaaagggcaggctagaactctcaggcaagggcctaagctgtagtccataggtggaatttcatctttttaaaggaagtctcagctctgctgttaaggcttttcaagtgattgaattagcccacccagattatgtaggataatctctagtacttaaagtcatctgtttatggacattaatgacatctacaaaatcctttcataacaatgcatagattagtgtttgattgaataacaggagactgtggactagccaagttgacacaaaactgactgtcatatattttttgtttgttttttgttttttttttaagagacagggcctcgctctgtcacccaggctggagtgcagtgacatgatcatagttcactgtaacctccagctcccggacttaagagagcctcctgcctcagcctcctgagtagctgggactacagatgtgagccactgcacctggactttacatgtattttttatggaaaataaatacatttttgactaaaaaaagtgaaaaaagagtggcgttgttttatgtttttgcaaatctctttagtgtctgacttaatagaagacagcctgattctaatatctgcttctgcattcagtctgttgcactctgttgttttggttgagatatgaagatctggccttatactggttatagttggaaagggaggaatattttaatagtctcttcagataattaaagatatgcttctttgatactacaccaggaattgagtaatagttgcttagaggttagttgtgatatagaatctgaaaccatattattgcattttttctacagttacattaaaatctattcatctgtcttaggctcttaatggatatttacctatgcatgattttgtaatattatgcatttatcactcagaaaatattggttcactgtcttatggagttctaaatgttgacacattttattactcaatataaaaaaatttcattagtatctccactgatctgaacaaaaagtatttaagtattgggatgcagtcaaactcatggtagcagatgtaagttttttaggaatctgatttttcattaaaagcttgaattttatcattggcaataaatattgccacttgtttttcttgaagtgtcgggcttactttgctcattttgagaaaacgtctaccaaatacttaagtcagaaaaaccataacttatctatcaatcattctttcaagtaaaaatggtctcccatggaaaaagtgacttcttagtctgagaacccaattgtacagatgtttttccttgagacaatggttgtacttcagaatgtagtagaagtgcttctattttgtcaaacagaatattaaaaatatgtctgtgttctaataaaactctattgacaaaaacaggcaatgggccatagtgcacagtttgacaacccctgctttatttaactccttgagcaaatgtagaagattaataatagccgttttgaggtttttatccatgaatgccatcatatatataattttttaaatctgtttttattgactgatttttctcctggtaatggatcttttcctcttcctttacttgtctggtaatttttcaattcgatgttaaacattgtaaattttacgttgttggtgggtgctggattttaacatatgtttttcaagagtgttaggttttgttttaaggtacattttagtattagtttgatccttttgcaggttgcttttctatgttgttatggaaaaatcccaggtacagtcatgcttcgcttaacaattgggatatgttctgagaaatgcattgttaggcaatttcattgttgtatgaacaccctacagtgtacttacatgcacctagatggtatagcctactgcgcacctagactatatggtatagcctattgcttctaggctatgaacctgtacagcatgttactgtattgaataggcaattacaacacaatggtaagtatttgtgtatctaaacaaaggaaaggtattgtaaaaatatactatataagcttatgggaccactgttgtataagtgatgcatcattgactgaaatgtcgttatgcagcacatgactgtggttttttattctgaaacttatttagcttcactactaaggtaaaatccttctgaaaattctgcccaatgcccagtgtataataaggtctctttattcttcaccttgtgtaaacccgaactgttctcaccctgtgtgggcactaggaagtgttcagtctgatactttctggtggttctttcctcaacctcaagtagtttcccttcacacatgtgcagattagttctcaagtggccctctctgcagatctttgcagtgctcactctgcacacctgcttcctctctggtactctgccccataagttctagccaccttagctttcccaaactccgatccccatctcctcaactcaggttgtctaccaggctctgtttactttccctttcttgtgttgcagcctggaaactgcctctggagcaaactgaggtgattgtaagctcattgtgtttgtttcctttctctcaaggattacagtctcaagctttctattgttcagtacctgaaaactcttatttcatgtattctgtctgattttctacttattattttagtgcaattcatgtaccagttaatcctttgtgggctaaagtggaaatcccttctttcattctctcttgagttcactctatccaggcttaagtttccagctctataatgcaactgatttaaaaaattttatccaacccaatagcagcattcgaaagagttgatcactcactttttcttgaaaagctctcttcccttgactttttatttttttagacaggttctcacctaactctgtcacccaggctggagtacagtggtgctatcatggttcactgcagctttgacccctcagactcaagcaatcctctcacctcagcctctcgagtagctgggaccacaggcatatgccaccatgcccagctaattttttaatttttagtacagataaggttttggtatgttgccctggttggtcttaaacttctgggctcaagagatcctcctgccttggcctcctaaagtgttgggattataggcatgagccaccatgcccagcccacttggcttcttggaactattctctcttcttttacacctaccttcttggtcacctcctcctctcagtcccttttgctggatcctcctcatcattttaacttctaggctttggggaatcccagaactcagtcctaggaccttttctcttctatatctgtactcaatccctaatatcatctggtcttatgatctttaaaatcttttataggctgtaactcctattgatatctgaattctgagctttcccatgaacttcagattcatattcatttgcgtaatgacatggaacttggataggtttacatacatggatttcctgatatgtccaaaactgcatttttgtttcccccatgaaggaaataaaacatgcaaataacaccaataaccaaaacctttatgtgaatcttgtcttttctgcttcaataaagttgtgattccattcttctagacactcacccaattagtcaagaaattctttctttttttttttgagacggagcctcactctgttgcctaggctgagtgcagtggcgtgatcttggctcactgcaacctccatctcccagattcaagcgattctcttgcttcagcctcccgagtagctgggattacaggcgcccgtcaccacacctggctaatttttgtatttttagtagagacggggttttgccatgttggccaggctggtcttgaactcctgacctcaggtgatccgcctgccttggcctcccagggtgctgggattgcaggcgtgagccaccgtgcccggccaagaaattctttcagctcctcttttgaactatatcttgagtctagttacttctcatcacttgacctgttacttccctgggtgaggtcactaccagctcttaactggtcactaccagctcttatctgtgctagctgatctccttgctttcattcttgcccaagcctcttctccattgggcagttagagcagtccttttaaaaaaagaagtcagatcatgttgttcctgcttctaggcttcctattttgctaaataaaagctaaaaaaaaaaaataccactttagcaaaaaaaaaaaaaacaaaaaccacagacctaaaggtcttatgtgatcttggccttggctagctctttgttttcttttattctccctcttactctctgtgttccagatactttagtctctttgttgtttctcagacacaccaggcatctttccacatgtaagcttttgcacttgttataattctctattcttgtgtgctgtttcactgggtatccacatggttcattttcttatctcttttaagcttttgctcaaatgtcaccttattaataaggctttgtcagttcacctgacataaaatataaaatagcgctagccccacctgtcacattctattctctcatcctgcttcattttcctctacagccttattacctcatatataatatatatttatttgtttgtcttcctcagtagaatttaaaccctatgaggtaagggcttttctttttcttttggtagtggtggttgttcattgccatattctcagcacccagaacagtgcctggcatatagtaggtcctcaataaatatttgttgaatgaatggatcttagtgctcattttgaaaagaatgctttttataaacagatatccactagatggcattattttcaaactttatgtaattaatgtctgggagcaaatgataggttattttctgttttttgccctaaacaaaaaagatctttgcaatgaagattgtcacaagaagttactaggatgaatgtgaggcatgtcgaatattgcatttatatttggtttttgatttatatatttttagatgtttattataaaataaaaaacatttagagaaacaaaattacagcatattggtgtgtaaatgatccatttaatacagttatttagcatggtaactgtgaacaaaggttgttcatgtctatccattgaccaccattccttttgtgaggccttcagcaatggcaaagcagcagtaagttccagagcctttcattactgaagccactagtggaaatccagaaaattgtcagctgttcagttcttgttgctaatgagctaggtactctcaatctggttcctaatcaactgggcattcaaattttgaaaaatttccatgtttctagaagatgttgccagacctatcctgttaaaaactggtaggttctaagtgccagagatttttagctgacttctctgaccagcactaaactcagcaaatagtttccctaatcaaaaatttacacttttcccccaaaccctcaggatttggctgctctgcctgtgccaatgccatctcatttcttgatttcctcccttacctcatttccttcttccatttcaatccctgtgcctctcttaagctcttttcctggatggttatttgatccattttattctcactcttcacacctcttttggtactattccttattcatgaagtattttttcctcttcctgttcaacttagctatgtatatttttcttttcaaattgttcaaaaatacacttaaaaacagttgttgaagttctctcttctcttttcctgttttgggcttttctcttttatttctgatcatagcaaatgtaaggacttgttttggttatgtttttaaagttcccagcttcttctcagaactctaactatttagaaatgaaaacactgttcttttgtacttttgagtctctaaatggaaaacaaaatataggatgctttttgagtttacagcctctcctcccagttcccctgggatggctaagtactagggctgataaaatgtcatttcatttaaaatgaaatgtgatggttaaactcaaaacatttaaaatgaaatgagatggttaaactcaaagacttatatttttaacatttttaaccataaatatgagaaatttctagtaatgctttccatatcttataatatgaatgatggcattttaacttgtcactctcttgtgtttggcctactgcatgtattaaactggctttgaggccagaattcagtgtttagaaaatcatgttttgtttactaagaaagtattggaacattaatttatttgggccataatttaaaggaattattgcatagcattaatttgcatgaattgtttcaattgagaaagtgtatttttctggaatgagacatgaagacttactgatatctattataatacaatataccatatttgttcaaatatacttatttcattcaagaaaatgaaagcattcttatttagtaaacatatcttatagctgctactctaaatatcacttacaaaaaacatatttaatcccagaaagataaatctcaagagacattgttgtttgctcaagattagatgagatccaacagcccttgctggttgcatgctctgactgctaacctctgttagtgcttacaaaagagagcttaattctaaatctgtatattaagccattttgcttatacctgctctattgataaggcttaggagtttctcaagtaaaattaattagagattcagcaatgtggctttaagtagaattgactgttttcgtttgtgctatttttttcacccacagactggttgaaatagcagaatcccgttttcccagatattttaacactgaagaaaagttacttttgacaagtagtaaagttcatctttatcgggaactcacctgtgatgaagttctacaaaggtatgctgctttagattttgattttttagtaatgcgttgaaggtttatgttttatcttttatgtttcagcttctaagtgaaaaaagtctttataggttagaattatgtggagtaactttttcagtgttcttctttgttatagccttttggttgaagtctttcttgaaaaacaaaaaaaattaaatgaataaaatgttctgtatttaattaattaagtggtgtattatttatctattgtttcattaacaaattgtctcacagtttagtagcttaaaacagcaaatacatattatttcacatagtttctgagggttaagtgtctgggagtagcttagctgggtgtttctggctcaatgtcgctcaagaggttatagtcaagctggtggccagggctgcagttatcttaaggcttgactggagctggagtacctgcttccaagctccctaatatagttgttggaagccctctgtttcttgctggcagtgggcaagagacctttgttccttaccgtctgggcctctccataaatcacaacatagcaagttgctttcctcagagtaagtgacctgagagactgggcaagtgaaagagtacccaagatggaagctgtagtcttttataacccacactcagaaataaggtaccatgatcttgtcatatgcttgtggtcatacagatcaagtctggcacactgtgggagggacctatacaaggatgcaaaataccaagaggagggagtaagtgtgggccattttgcagactggctaccacaagtagttttaccccagaattggagcgttaacattatcttaggagaatcaaggaattctgaaactacacagaaacagtttgctctgtttccagaaaagtatgatatgtctacaagttaggtttactgaattcttgcaaatcattactgtaacttaggaaagaatagtttattgtttttaagttgcttagcctttgcaatacctttatttatttattttatcttaaatttattgactattttataaattcttcttttataggattgaatctttggaagaagaaattatctcaaaaggaattaaacttgtgattcttgactctgttgcttctgtggtcagaaaggagtttgatgcacaacttcaaggcaatctcaaagaaagaaacaagttcttggcaagagaggcatcctccttgaagtatttggctgaggagttttcaatcccagtaagtttttctttttttctcttttttcttttcctttcttttgtttcttttatattacattcactgacttatggtatcaaataataaaattagaggaaaatgtaaaacagatgactttttaaaggtagtacagtctaattgctatagcaaacatcgccatcatcttaaattagctcatctgctgagattattttattattttaataatttgagtctggagtagatttaaacgatgtttttaaaagttcctatagtccctccttttcttccttctcattgtttactctttgtgtgtgctttgtatcacatttctcacactgcagtaaatataaagtagtaaaacttcatgaaattgcctagatctatttctatataattaaaaaaaatactgcagttgttgttagttttgttttaagtattttaggtttagatactgtgttattgtgttcagcgctgttttgtgtacaataggatttggtttgcttcaaatggtcagaggtcaaccattaagagatgttggaatgatagtaatgaaagtgtcagtaagaaaaccttgaaagattatttgtggcatggctttttgtagcgggcattgtgatcagaaatctgaagatgacaggctattacaagggcttgtgatgtgtaacctgcaagacgtaagtgtgtactaagttacactcccatctgcagtgtgtcagggagttttagtcgttgttccacagcctcatcaacattcaggcttctcaattttagtcatgcttcatctcaagaaaagatagttccttaaactgagataaaatttggttatgattttataatttttagatttgtttttggaaaattaaaatcttggatctttgcaacataaagaatatgtataaataatataaactatcacacagcctttgaggtttataaaaccaaggaagaagtcaagggagaaaatatgacattcaaaaagttctgcatactttaatggctttttagtttatattttgaattaaagtcaagtgctgttaagtttgtcttgggtgatgttcatcttttacattttattgtagttggttaaaatgataaattcaaatttatatttttcctgatcaaggagaataagggaactttgaaatactgtataaagatacttgattgaatagaaagttatgtatatagttggccctctgtatctgtgggttctgcatccatggattcaaccaactaaagataggagatatttgaaaaagcaatgggtgtggtagtgtgcccctgcagtctcagctactcaagaggctgaggtgggaggatcacttaggcgcaggaggttgaggttgcattgagccatgttcatgtcactgcacttcagcctgggagacagagtgagaccctctctctaaaaatatatatatatatttgaaagaaaagaaaaggatagttgtctttgtactgaacatgtacagacttttttcttgtcatgattccctatagttaagcagagatttacatagcatgtacattgtattgggtattataagtaatgtaaagttgatttaaagtataccagagaatgtacatagattatgtgcaaacactgcaccattttatatgagggacttgagcatccgtggattatggtatctgcagaggagtcctggaaccaatcccccatggatacagggggatgactatatattcttattttattattaattcatactgttgcttgacttaattccgtgcaaaataaaattcactttttaaatgttgtgtttgtttgcttttaagtagtaactgtaggctaatgcttttcagtttttcctaaggtgatttattttcccaagtgagaaaggggcactgcttttctttgtttttaatagaaccctctgaaaaaataggtactgaatatcccatttctatgcctttggctttgtttctctatttagaaataaatgcagattatactatgtacttatataactgtgatatctgttttttgtgacaattaagattgtaagattggttttaaaaggattttgaaaaatatttcctttagaaaatgttggaattttcctagctaaattgatacatttaaatggaaaatctctcacacaggtccgagatttaattaaaaaaaaaaaaaggaaatcatgaacttttacacatttatactgtactttgaacaggcaccatagtactgttcaaattaattatgtcaatttaatatgttatatatgataatttgctaaattaaattattgcttgctatatatataagcttacctcacagattgtcttgaaatatgtatataaatataaatatataaaaataaaaaatatatataataaaaatatataaatatataaaatgtgattattcagcttttccccccctttctctatttgaactagtactagaaaacctcgtcttttgggaagggtgacatcatttggcccttatgtgcgcatgaatgcatttaagttttaagtatgctgttgcttttttctacgttagtccctgagaattaaagaggaattaatcgatatcacttgattgaaaacagatgtattaatatctttcagaagttttcaattataagatggctttactaatattttgaggctatcactgaaatgaaaacataaaattaaaaaattttcacagagaattttatagacctttgagtatgttcagactgcagttttgagaaacagttgtagaagtctggtagaatcttttctcctgaagtttatggaggaggtgtaagtgatactctgccattgggatggaagatgcggaacctttgtctttttaaagtgttcacactagtattgaaaaaacagtaggctctgaagctgtttagagatactggataaaagtaaccgaaaaaaatttaaatactgctttataaaataaattgtggttatggctatttatgttgactttatcattgacttctaattaccacgtacagaatagttattatacgtattgtaaattatgtatcagattaaaataataggatgtttttgccagaaaggaccttaaagaaaatttagtttggccccttcattttacagatgacaatgaatccgaaaagtgacctgatttgctccaggacactcaacataggaaaggacaaacagtgggtagaatgagagatcttttagctgccagtttggggatttttttttttccacagcagaattttctttttttctgagacatacagaattacggtggactgtaaacttctttttatttatttattattattattatactttaagttttagggtacatgtgcacaatgtgcaggttagttacatatgtatacatgtgccatgctggtgcgctgcacccactaactcgtcatctagcattaggtatatctcccagtgctatccctcccccctccccccaccccacaacagtccccagagtgtaaacttcttaatgacaggattatattttctgtttctctgatttccaggacctagcactgtggataactaatatttaggaggtaacagctaatgaaagtacaattaaggtttatgaaaatagtcttaccatatgtatgtcatatttacattcattggaatatttttctttatcttttaaaacataatttgaatttttttatgcttgctgctgaaattcttatgtttttgtttttaaattgacctttgtagtatgccatcttagttgtattctttttatttattttccattccagagttttataagttgttggaataaaagaaaatgaaaatgcattgcttagataacaggactttcaccttttgaaaattctttggaaatgctttttactggtatttccaaggtctacatttttactttttcagagaattcaacaaatcaatttcagttgttatatgaataatattgaacttttttgtctccccttaatcttcttctacttccttcatttcttgatattgtacaaatgttttctggtgtaaggggaggagtaccagttaacactatttacaaaagaggtttatggagataaatttggatatattattaaatattctaagagggaaatgccttattttcattgaaagttgttgttaaaatccaaattattttactaagatgtgcttataatccgtttttctgtggccatctgtgttcttgattacatgccttttgagaatatccattgctctaatttattgcttatcaaggtttttggaatattagtgattatttttatgtttaaagctgcttagacaaatgaatcaaaatatgtgcattttaaattttgctattttaaagacagttttaaatcattaacaaatggaaagaatttgttctggttttaaagtggacatataacaaggttaaattttttattattatttgagacaagcacaaatttttttttcctctttttaatggtgaacttcatgtgggcctggatttatttatttatttatttattttacaccatgagctgttccattatgccaagtgggtttaatttatgcaggattataccttgtcttagatactaataaatattcaaaatagaaaaataagaaactaggccacttcatttaaaataattaaggttttattaattataaattgggaatattgtgtttataactggtgagataagaggaaaaagaatgtatgtacccaaattcgacatttatttttatcttaaacataaatattcagaactgtcacttttgtgaaagcctgatgaagtcactctgattgtaaagtaggaatcctagacccttgatgtagacatagatatgccattaaaactgcagtcctgttttgctgtgtgtaacattgttgtatcacttttctagaaatgtaatttttggtttactcttattactttcatatttttactgaaaacaagcaccacaggacttctgaggtaagaaaagtcctttacaggatttttcttttccataaatgcttactgttggctcactcacatttgaaatcagattgttcttaaacctatcctatgttcattcaggtccctgaaactcacagtctagactaaacctttatcagttagtgaaaataattctagaaaaagtgtatctttcttttatgtagctctttatgacttctgaaactttgtttttattgtttctagcaaaaacctagaaacaacttaaaagttagtaagtaggtgattggctaaattaatgttgacatatccatacaatattatattgtgccactgttacaatgaatggtttagcccagaaatggattcataggttatgcaggcaagggttaattcagctagcatgggttactcatatccagccattcccaaaaaaggcctcttttcaggactgcccttgcctggctcctgggagatgagtgctgggccctgggaatactctgcctagtaagggtgttatatgcctgaggacttgagccacaggtactggtttgatcagattgtttatgcaaacagtgtgatttatggtgaagcctatttttctctggggatctggggactacaatctaaatagctgaggtcatctgcatgcaggcattgcatgcctagtgactgaccctcaatagaaatgctggacattaaggcttgagtgaactttcctggttgacattactttgcatgtgttgtcacacattgttgctaggacaattaagcacatgcatgcgactccactgggagaggacacctggaatcttgcacctggtttctcctggactttgcttatgctccttttctgtttgctcattttgatctgtatcctttttctgtaataagccataactgtgaatataacagcttttgagtcctgtgagtccttctagtaaatcattgagccagaaggtaatcatggggaaccttgacatgcaggggtgctaatagatatgtacaagagtatctatggcagcttaatttgtaattgctcaaaactggcaagatgtattgtagttaatagtattggcatcagtcttaatacattggctttgataattatggtttgtaagatggtgatattaggagaagctgggtgaagggcatttgggaactctaccctttctgcaactttttggtaaatctaaaattgtttcaaaataaaaagttaaaaaaagaaaaggaggtcaggtgtgctggatcacacctgaaatcccagcatttgggaagctaaggcaggaggatcacttggccaggagctagagaccagactgtgcaacatagcaagacctcatcttctcacacacacagacacagacacacacacacacacacacacacacacacacacacacacacaaaaaaaaacaattagctgggtgtggtgctacacacctgtagtcacagctacttgggaggctggggcgggaggatggcttgaacccaggagttcaaggctgcaatgagctatgaacatgccactgcattccagcctgggcgacagagcaagaccctgtctcaaaataaataaataaatagaaataaataaataaatgaaaaggagagtagggcgggttttatgagtagaagttggctctgggtagtcataaagaaatggcactggctgtatttggagaaggggacttgattttgatgcactggttctcttctatttagtcatctggtcccatacatattatctaatacctcttcaatttaaaccctgctcttcatctttcagcacatcctcttggctccgctttcgaaatacattcagtatctgattactttctaccaccttcattgccatcatcttggttcctggaggctaaaagtactggctttggagttagacgttggtttgaatcttagctccactatttgctaattttatgaccttgaataagtatttatcccagctctaacctttcgtttccatgtttgaaaaatgaggataacaatatctgactcatagggctgtgagtattaaatgagataatgtctgtaatgttcttcacaatgtttggcatattcagtaaaaagtagcctttaattattaattttactagttacctcgttccagatgcctggtgtattttatctctttcctcctaaaatattttttaacaaggctgcaagtgcctcagaaggaagaatcatgtcttattcactattgtatccccctctgtctgtcttactggtggatgctgttactgcctgaaccctcctttatctggttaacttacacttattttttggatctcagactctttttgtctttccttttcgattccacctacagcacttgtgtccaaaactccatgctaggaacaatgggataataaagatgaataaaacatagtatttgcccttaaggcttctacaaataaggtaattgtagaggcaaatcgctctctgtgatataatggagaataaaataagtatcttgtctactgttcctttcctgtttcttaaaatatgtaagtagcttgtaagtaacttctctgtctgtcctttgtttgggactatagattacacagagggaattaaagggaggtagtagagaccttcatagtctctcgggtaaaccctttatcatgtctagctttggtccttaaatgtcccattctttttttctttttattttttgagacaaggtctctctctttcccaggcaggagtgcaatggcgtggtcatagcttactgcagctatgccgagttctagtgatcctcctgcctcaacctcccaaatatctgggactagaggcatgtaccaccatgcctagctaatttttttgatttttagtagagacaggtcttgctatgttgcccaggctggtcttgaactcctgggctgaagcagtctgcccactgtggcctcctaaagttctaggattataggcatgagccactgtgcctggccagggttccattcttatttagaaagtcagtgctcttttggagactgataggtagtggttaaattcataaagcacatgcataattctaaagttgtatgctaagaaaacattggaaatgaaggccagttgtagctcttagtctttagcgttactttacgtatgttacacagtaccttgatttgttgtagaattttctaactgaagatcttaaggttgtagctgagtggcaatcttgttttccagtgagtacagggatgcagagaatgaggtgatttatgtaagattgcttaaggagtcatttggataattgaataatatcacttgccgcttccatcctgggttgttattgtagtatcttaatgggtctgcttctctcttttctgtatcggtaatagtacatatgggtacataccattgctacatcattttcccaaagtgtatttctgatcacatccctcctatgctcagaagcattgtatggtaccatgatgcttatagaattaagccactagactataagcagtatgggggcagagaaactatttgttttgtccacagttgtatcctttgaagctaggacaatgtatggcacataatatatgctctaattaatatttattgaatgattaagtcttagtttaggatatgatataatatttaaagttctcttccttctggctccaacctactcctcccatgttgtcatttctcttctgtgcaggctgctggtatactaccccgagacctctctatggctttttagctgtggatgtcctcttctttcatctcttcctttctaaatttttttctttcctatctgagctctcaagttctgtctctcctctgagatttttgtatcactgttttagccccagttaattctaccttcttttgtagtacacatggtcttaacttctaattggaactttaattatgtatttgccttgcagtgtcacttaaatatttgcatgtatatatctgagctcctcagttatattataaagccccctgaaaacagaattatgttcttatgcatcctccatagctgcctatattgaatagtgtcatatattgagtaggtgtccaatatatatttgtagaatgatgtatcacactttttctagttaggcaatttttgaaatgcatgtctaattagatgcctacttcaattcttacactacttaaagggaaaacattctaacattcattctaaaaattgaaaagatactgggaaactaaaacttaagtgtctcccctgcacccctttaaaactgaatgtagaagatttgttgataatttgacagctctgtacctttaatttagtatgatgcatgaacttctgtgagacatcaaccaagattttatacgaagagctgtgatcatcaaggtgggaatttaacatcagtgctctgtacacatagtattactgtaatgccttctttagaagtttaacaacgtcaggtgatattctatgttatgatttttaacttatcaaaggaaagcattgtagagaaattagatcatctcttgaatagaatctgataactgctcactgtttaattaaattcaaataaacagtttgaaatagaatattggctgtatgagagtttggtcaaaggatattttcttgagtttttcaaagacaaaatttgtttttttggttgatatttttacatatcctttgcgtttcttgaatgtagttcacttagttaatacagtacagttaatacagttaccttccaagtaaagctggagggaaaatactttctgataagaaaatatatttcaaataataaaacagtatgatactagcataaaacagatatatagaccaatggaacagaatagagagcccagaaataaacctgcgcatgtgtggtcaattgatctttgacacaggtatcaagaatacacaagggggaaaggacagcctcttcaataaacggtgtcaggaaaactcgatattcacatgcacaagaatgagattgggcccttattttataccatacacaaaaaataaattcaaatggactaaagacttaaacataagacctaaaaactaaaaactcttagaagagaacatagaggaaaagctttgtgacagcagccttggcaatgatttattggatatgacaacaaatgcacaggtaacaaaagcaaaaatagacaaatggaactatgccaaacttaaaagcttctgcatagcaaaggaaataagaaaaggaacaaacaactcacgaaataggagaaaatatttggaaaccacaaatctgatgataaagggttaatatccaaaatatataaataactccaaaactcaatagtaaaacaagaacaagcaagcaaacaagagacaatacaattaaaaaatgggcaaaagaactgaatagaaatttctcaaaagaagacatacatatggttcacaggtataagattcacaaagttactaatcataagggaaatggaaatcaaaaccacaataagataacactcacatcgcttaatacggttattatttaaaaacccacaaaagatagtaggagtgggcaggatgtgaagaaaagagaacccttgttcactttttttttttttttgagatggagtttcgctcttgctacccagtctggagtgcaatggcgccatctcagctcactgcaacctctgcctcctgggttcaagtgattttcctgtctcagtctcccaagtacctgggattacaggcatgtgccaccacgcccagctaatttttttgtatttttagtagagatgaggtttcaccatgttggtcaggctgatctcgaactcctgacctcaggtgatccatccacctcagcctcccaaagtgctgggattataggcatgagccaccatgcctggtcccttgttcacttttggtgggaatgtaaattggtgtagctacctgctatggaaaacagtttggaggtttctcaaaacattaaagataggactaccatatgatccagcagtcttatttctggccatatatccaaaggaattaaaatcaggatctcaagtaaatatctgaattcctatgttcattgtaggattattcccaatagctaagtcatggaagcaatctaaatgtccatccatggatgaatggaaaaagaaaatgtcatatacacacacaatgatatattatttagccttaaataaaaaagaaggaaatactactatctgtgacaacatggatgaacctggaagacattacgctaaatgagataagccagacagagaagaacaaagaatacatgatcccacttttactagtatatggaatctaaaatagtcaaactcatagagcaaagagtagaatggtgattgccaggggctgagaggaggaggaaacagggaggtattggtgaaagggtaaaagttttagttacacaagatgataagtcctggagacacagtgcctatagtgaacagtaatgtatacttaagcatttgttgaaaggtagatcttacattgtgttcttatcccatacactgtataaataaagagcacaggtggaaacttttagaagtaatggatgtgtttatggcattgaccgtagtgatggtttcacagtgtacattctccaagttgtatgcattaaacatacacagttttgtatatgtcaaacaaataaaaagccagaaaacaactttaattttcctagttagaatgttttccctttattgaatataagaattcaagaggcacttaattaactttgtaagattaaaaatatttcccaaacatttaagaatctatgtaaaacataacagctgtggtttaaaggttttattatcttccaatacaagtaacaaaatgtaaattagaggatattaaaaattatgtatttttcacttgaacattgtttcctaccccttttttgacttctgtttatctttgatattgaaagataaatattcttgttgattttacatctctattaatttagattcttttttttctttttttgagtcagagttttgctctgttgcccaggctggagtgcagtggcatgatcttggctcactgcaacctccgcctcccgggctcatgctattctcctgcctcagcctcccgagtagctgggactataggcacccgccaccacgcccggctaatttttttttttttatatttttagtagagacggggtttcaccatgttagccaggatggtcttgatctcctgacctcgtgatctgcccaccttggcctcccaaagtgctgggattacaggtgtgagccaccacacccggcctagattattttaatgttgactcagtttctgctgggaaatatcttcttaaaagtgaaacatttgcattagattatagcttttttaaccttaaggctattttgatggttataggagagaaaagtatgtatggctagacagagagcaatagttctttttgtattaccattaatggtttgaacctaagctccttttaaaattaaattttgattataaacatttgggctttgaagtcccttttaagatcagggtccttatttattgtctcagagtttgtgttaattgttttactggaaaaaataagtagtcattgacattgaaaaaatttctacaggtttgaaatgctgttaagaagaaatagctacatcttattgataactactttttttgtttcgggttctgtagtgagtacattttaaacattttccatttcatattctaaataagtttgtgaggtaggttatactattccctttttatagttgaagaaattgaggcttatagaggttaaataactttaccagagtcacttggctagtaagtggaagggcttgagtttgaatccagatatgtgtgattacaatgcatgtgttcttattcataatggaacactgcctcctaatgcagtagtcaaaattattctattcccttgctgcttatcatactaaaaacttttcaatacttattgtttcctctaagcctttttcaatggaaagtctctaattttgctttatgctttgattgctgcttgtaagtgtaaccacagtgttgcttctgtattagtgttatcagtatttaaagtaagagaaatatttgattatttgcagctttgattgctttttcacaaacatgcaaatcacacatgtaatgttaagagtataattaatgccttttatgtgccagtgaatatactgaagacttgtaggttttctgaacaatattctcagaattggcaaacttgtagcttaagtcttgtaataaggatgctgtcttaggaaaataatttcaaaatacttgcactttagacctctcttggggaacacatgaagtaaggctgcttcctaagattctgctttgaggttttatgaagacacaatacatgctgttactggacagaagacattttagtttcatgacattgccaaatgtatctcgtaaaattcactgttcatgaatttaattaaaagttcttaggagcttaaaacttaaagtaggtattttagactcatgactcaaaggatcttctttcagtttgtgtgtgtgtgtgtgtgtgtgtgtgtcatacacacacacacacacacataaatatatatatttgaaggagttacagttctaaactaaactggaataaagtaatgcccatagttattaagtactaaagtacagtattttaaagaaatgttgaaattgttataatatgaagtttcttagtgcccctagcttacagccactaaagttagttttatatctgataccatattgtaatgaatttacttttttgttctgtatgatctttagcttagtttactgggttgcccaataacatgggattgacctgcctgctaaccttgtgttggagtctgcttagtccctagttcagctaggtccaagtttttgtctcatgaccaagaagaataaggcttgcagccactggagagtaaatagagtagaatttattaagcgaaaggaaagctcttagcaaagagaggggacctgaaagcaggttgccagaaataggactgagttctgggtcttttatgtggcaagagcaaggaagccttctgtgggttctgcccaaaatgggagggctaaagttccctcctaaggatgttgcatctgtgcatgcctggggttgactccatcttagttattacccgtgagtgcctaagcgaaagccacaggggtactaaaaccacaatgcgaatgtcatgttaatggcattataatgagttgggccaagttaaggacatttaggttgacttattgcgcctgtgcctaagttgggatggtcccttctgagcaacatcctggcatgagggtaagttcttaatcatatttcttctcattagctacagggacagtgcaggtgcagtcctgtgggtatttttccactccgaagaccctccctctctatctgcctaaactgcctcctctgtcacttggaaatggcagtttactgttgaacaatagacctctccttatgcttttctcttccagtctttgggaatcacactctgaagattaaacatttcactgagacagcatgacgcagtagaaggtacccagaatcacaatacagttcacagtaacaaagatatggaatcaaccaaagtggatgattggatgaggaaagtgtagtatatatacacaatggaatactattcagccataaaaagaatgaaataatgtcttttgcagcaacatggatcaaactggaggccattatcttatgtgaaataagctagacacaaaaagacaaataccacatataagtgggagtgaaataatgtgtacccatggatgtagagtgtggaatgatagacagtggagactgggaagggtgggagggggttggatgatgagaaattacttaattggtacaatgtatgttattccagtgatggatacctggaaagtcctgacttcatcactatgcaatatatccatgtaacaaaattacactgtatcccatacatttatataaatgaaatgaaaaatgaaagaaaataggagtttaagtaccatatgtgttacaactagctgtgcaatcctggacgagtcagttctcatttctgagcctcagtatccctatctgtagaaagtggctaaaagttgctacctcataaggcttaatattattactaataatattaatagatgaatagtaatatatttccgattactaaactttatagaggtttttataatttataagcactttcatatataataattttatagggatgtatatttatctatatttctgaaaggactttgtaaattctgaagcactacgtaacttgttagttgatagttccataaccagctaaatctgatttagtgactgtttttatccttagttatttgaacaatgaatcagaattttctaagctcagataatgcacttaactcaatttgttcagctaaaataaaagttttggaatgttttttaactagtgttaagatttgttttaaaattagattgtaacgacatctggcttttatattattatttaaagatgtagaaatggtgatgtagtaaaaatcatgagtggttagtagttgggggctagtgtcatttttaggagttgcagtgatgaactctatccactaaatttagtgatggatcagtgtagttcttttaaaataaatatttagtactttatgtttacagaggaccctgcaattattagttagcttataccaatatttattgctatataaagggctgggcaagtgcctataatggccacctttggagaggatttacaggcacctttgagaaaacttcttttttttttgaagatggagtcttgctctgtcacccaggctggagtgcagtggtgtgatctcggctcactgtgacctccacctcctggattcaggcaattctcttgcctaagcctcctgagtagctgggattacaggctcccaccaccatgccctttttaacagctaatttttgtatttttaggagagatagggtttcaccatgttgaccaggctggttttaaactcctgacctcaaatgatctgcccacctctgcctcccaaagtgctgggattacaggcgtgagccaccgcgcctggcctgagaaaacttctaactctgagtttagttggtttgtctgtatactgtcaggaatctgcaaagcttatttgatcgtttatttgtaccagcattttccctgagaagttattctgaaaaatactctctctcaaaatgataaaaaccttttctgtgcatttgtttcagaatcttaccgcttctaggacctagaacttctttctgaagtgtaacctaaatatttgccttaagaagttaaataactaatatttttagtgtaaccaccatttaaggcatttaaaaaaaatgaaatagtctgctttcaagactcttgtttctattatggatataaaacatatttttaaaaagatcaacattataaggtagtagatagtaagtattaattaggtgtttgtggcagatactgttagttgcctacccaaaacttatttccattttcaccttgttaatagaaccctaatcgtgttttggtagctgtgtgcccagcctcagttcatgacagtcatgttttctgatttcccaacttcttctacaactgaggatagccatgtgatcgagttctggacagtgttacctgtttagctctccattttttttctttccaacttttatttaaggttcagggggtacatgtgcaggtttgttatgtgggtaaattgcatgttgtgggggtttggtgttcagattatttcattacccaggtaataagcatagtacccagtaggtagtttttcagtgcataccctcctcccaccagccaccctcaagtaggcccccgtatctatggtttccttctttgtattcatgaggactcagtgttgagcttctacttacaagtgaggacatgcagtatttggttttctgttcctgcattaattagcctaggataatggcctccagctccatccatgttgctgcaaaggacatgatttattcttttttaatggctgcatagtatttcatggtatatatgtaccacattttctttatctcgttcaccgttagtgggcatttaggttgattccatgtctttgctattgtgaatagtgctgtgatggacatatgtgtgcttgtgtctttatggtagaatccttatattcctttggttatatacctagtagtaggattgctaggttgaacgatagttctaagttcttcgaaagattgccaaactactttccacaatggctaaacttattaacattcctaccaacagtgtataagcattcccttttctctgcaaccttgctagcatctattattttttgagtttttaataatagctattctgactggtgtgagatggtatctcattttgattttagtatacatttctctaatgattaggaatgttgactttttttttttttttttttgagatggagtcttgctctgttgccaggctggtgtgcagaggtgcgatctcggctcactgcaatctctgcctcccaggttcaagtgattctcctgcctcaggctcccacgtagctgctaagcatgccaccacacccagctaatttttgtatttttttcatatgccttttgattgtgtgtttgtcttcttttgagaaatgtctgtttatgtcctttgcccatttttaatggatctgtttgtttttacttgttaatttcctcaaattctctatagattctggatattagatctctgttaagatacatagtttgcaaatattttctccctttaggttatctgtttattctgtttatagtttcttttgttgtaacagatctctttcatttaactagatcctatttgtcagtttttttttttttcaattgcttttggagcctttgtcatgaaatctttgccatcacctatgtccagaatagtgtttcctaggttttcttctatggtttttgtagttttaagttttatatttaagtctttaggccatcttgagttggtttctgtatatggtaaaaggaaggaatctaatttcagtcttctgcatatggctagccagttatcccagcaccatttatttaatagagaattcagtaaatgctgctgggattacttgttttcataaactttatcaaagatcagatggttgtaggtatgtggctttatttctgggttttctaacctgttctgttgttctgtgtgtctgctttggaccagtaccatgctgttttggttactgtagtcttgtaatatactttgaagttgggtagtgtgatgcttctggctgtgttataatatttttgcttaggattgctttggcttttcaggttctatatgaattttagaataggtttttttccaattctgtgaaaaatgttggtagtttgatagaaatagcattgaatctgtaaattgctttgggcagtatagccattttaacaatattgattctttcaatccatgagcatggaatgtttttccatttgtttgtgtcatctctgacttctttcagcagtgttttgtaattcttgttgtagagatttttcacctccctggttagctgtgttcctaggtactttttttgtgtgtgtggctattgtgaataggattgcattattgatttgactctcagcttggctgttgttggtgtatagaaatgctactgatttttgtacattgattttgttttctgaaactttgctcaagtcatttatcagatctaggaacatttgggcagagattataaggctttctaggtataaaatcatatcacctgcaaagagagatttcctctcttcctgtctggatgccgtttatttctttatcttgtctaattgctctggctagaacttccagtataggagtggtaagtgtgggcatccttgccttgttccaggtctcaaggggaatgcttcaagcttttgattatttggtaggatattagctgtgggtttgtcatagatgagtcttcttattctgcggtatgtttcttcagtacctagtttattgagggtttttagcacaaaaggatgttgaattttattgaaagccttttctgtgtctgttgagttgatcatgtggtttttgtttttagttttgtttatgtgatgaaccacgtttattgatttgcatgttgagccaaccttgcatctcaggaataaagcctggttgattaggtagatgagctttttgatttgctgctggatttggtttgcttgtattttgttgaggatttttgcatctatgtttatcagggatattggcctgaagctttcttttttcattgtgtctctgccaagtattggtatcagcatgatcctggcctcatacagtgagttaggagggagtccttccttctggatttttgggaatagtttcagtaggattggtatcagcttatttttttacatcaggtgggctttggatttgaatcaatctggtccagggttttttctggctggtaggctttttattactgattcaatttcacaatttgttagttgtctgtttagggtttcaatttcttcctggttcaatcttgggttgttttatattttcaggaaattatccatttcttctaggttttttagtttgtgcacatagtgatatttgtaataatctctgagggttttgtgtatttctgtggggttgctggtaatgtcccctttgtgtgttgtgattgtgtttatttgaatattctctcttctttcccttccttccttccttctttctttctttttttcttttttgacgaaatttcagtcttgttgcccaggctggagtgcaatggcaccatctcagctcaccacaacctctgcctcctgggttcaagcgattctcctgcctcagcctcctgagtagctgggattacaggcatgtgctaccatacccggctaattttgtatttttagtaaagacagggtttctccatgttggtcaggctggtcttgaagtcccgacctgaggtgatctgcccatcttggcctcccaaagttctgggattacaggtgtgagccactgtgcctggccctggatcttctctcttttacttattagtctacctagtggtctatcaatcttattcatttttttcaaagggccagcttttggttttgttgatcttttgtatggtttttcgtgactcaatttcattcaattcagctctgatttcagttatttcttgtcttctgctagcttcggagttggtatgctcttgtttttttggtttctctaggtgtgatgttaggttgttaatttgagatttttctatgctttagttctctactgctgcttaatattttgttataaaatatagtaccttaaaacaacaattataatttattatatctcatggtttgtgtgggtgagtaattcagataaggacttgtttctgctccatgatgtctgaggcctcagctagaagactcaaagactgaggctggagtcatatgaaagcttgttcatgccattttttagttaatgcttgtacctgctgggggtccagctggaacattcacatgtggttttaatattatcactgggtttttttatgaccctgcctccggagttatttagcatcacttctgctgtactctattagacaagactgttaaaaatctcctcctagacttacagggagagaatatgtccccttctgtcagttggaggagcatgtatcatgttgtagaaagaaagtattaaacagaataaatatattgaggtggtcatctttagaaaatacagcttactacagcatttaagggaaggtttattgttggggggctgtggcgctgttgggcagtgatgttttaggcatgatcctttgttgcttattccttcttcatgcctcaaaggagcagcaaccatcttgtgcccataaggtgataaatcaaccgctaaggattttgacatcattggaagtcagtcctggatgatccatttccaggcttctttttttcctgtgtggaaaaaaatacctatttgtttaaattactatattaaggattttgttttttaaaaccaatcataatccccaaatgtcatggttgtcaactttgaggatacataggaatcacctgtggggcttgttaagatacagattgcttggccccatgttagagtttctgattcactaggtctggcataggctcaagaagctggatttgtaacaggctctctggtgttgtcaatgctgtggtcttgggactgaggtatgggctttgagacttcagagaagagtgggtggctagggctgaccttaagggaaaggtggaacttgggaaaaatagatgagatttagacaggattagggaagcaattccaagtattacaaatggtatcaacaaaaaacatgatagcagaaaaagtgtacttttttgttttttaggatttctgtgagtaaattagcttacttggagcaggagttttgtttttttttttttaactgaggatgggagattaggttaaagggaaaataaggactggattaaggtccttggaagccagagagacatttgtttttttattttgtagctagttaggaactgctagaagttttcatagagagtagtgtggccacagcagtatgctagcagacacctatgtttggtggtggtagtggagtgcatttagttattaaacaaatttaaacaaatggttcttgagcatttgtgatgtcttggactcagttctatgaactgggaatacaaaggtaaataagacgtggatcctgccatcaaagagcacggtctagtgcaggaattctcagagtgtgggtgagtacccctgggggtccctgagaccttttcaaggagaaaagattaaaagtattttcataataatattaataattctaagaattctgagacactgtttacttttttgtcattctctttcattagtgtacaagtttttcagaggctttgtaacataggatgtcatcattgctcatatagctaatggaatacaagcttgtgtattaaaacttttgttttaatttcttaattataacttggtaaatactgatagacataaccccctaaacaaaagctctttggaatcttcagtaatttttttaagaggtagagtcgtgaagccataaagtttgaaaactgctgttccagagaatagattggaggagaaaacacatgaaaaacaaaagactaacactctagatgtgaggtaataagagcttaaactagagttataacaaatgaaaagtggaggaagagatattttgtagacactgaagagtggaaaaattgataatacctagtgtaaattatggtgtgggaaaacggatactgctagtgaacatgtaaattagtaccagccttttggaggaacaatttgacaaaacttattgcagactttaaaaatgaatctttcctgtgacttattctgtacttatcataaggaaacaaataagaatatatctttgcggttttgtttgtagtatcagtaaaaatttataagaagcctaagtatcagaggagtttgattaaataaattattacatcaattcaataaaatgctgtgtagtcactaaaaataatgatgtgggtgaatatttaatgtaaaaaattatatacttttttgttgttgttttgttttggattttttgagagagggtctctgttgcacaggctggagtagcgtagcacgaacatggctcactgcagccttcacctcctgggcttaagccagggactacaggcacacaccacacacctggctaacttttttaaaaaagttttttttaaagatgcggtctcaccatattgtccagactggtcttgaactcctgggctcaagccatcctcccatcttggccttccaaagtgttgggattacaggcatgagccaccacatgtggccaaaaaatactttttataaatacctcagttgcataatgttttctccattatcaacttgacaggcctttgtttaaggtttacggttataagtacttatttgtgtaaaatttaagatctatcaatatgtctaatttttcagaaatttttttcttcaacattttagcctttggcccattttcaaattgtatgtaggccaaggcatacacagtggacattgtgcagctgcgtatacgaatatagccaacattaagaggtcccttgcaataatgctgtttcagaaaggatgtttactgttcttttgaacatagttttcttgtttctgctttaacttataaatatttctcgggaggctgaggcaggagaatggcgtgaacccaggaggcggagcttgcagtgagccgagatcgcgccactgcactccagcctgggcgacagagcgagactctgtctcaaaaaaaaaaaaaaaaaaaaaaaaaaaaaaaaaaaaatatttaaataaaaataatgtttcactgaagaaattgtaaaagtgaactatatgttaaaaataatctaggaaactaaattactgctattccactttgcagtttgatattgctcattttttgactcgtaaagtcagtgtcgatgccttttaactttttttttaaaattttactggatttgtattttaccatatttgtgcagtgactttgattaggtaccaattgaattcagattaaaaagcataaacctacatctgaagatagcctagtataatttatattgtgcatcgttctgattttgaaataataattctcctttacaacgttagggctgaataaaagatagaatccttatgaaatagtgagcccaatgtcattttttttttttttgagtcagagtcttgctctgttgcccagactgtagtgcagtggcacaatcttggctcactgcaacctccgcctcccaggttcaagcatttctcttgcctcagcctcctgagtagctgggaccacaggcatgctccaccacacccggctaatttttgtatatgtatttttagtaaagacgaggtgtcactgtgttggccaggctggtctcaaactcctggcctcaagtgatccacccatctgtgcctcccaaagttctaggattacagatgtgagccaccgtgcccagccccagtctcattttggaaatagagcagagacagatggaaaactgttagcccttggtgatgttattgagcagtgttatctgtgggtttccagatgtgttaatatatgtattttcttattaagtcctttgcattgaaatggtggtgcatggactggcagcattagcattacctatgagtttgttggaaatgaggaattttagactgtaccctagttcaattgaatcaaaatccattttaataggatccccagataagtcatatgcacacaaaagctggagaagtattattttacaccactttgagttggatttttatttactcgcaactggatgcatcctgatatgacattctggagttgttgtttgttttcttgtttgtttttcctgaagaggtacaaccttctccaggcatgctattgtgaatattggaggggtgccatttctgattataatagaaacagcatttgttgagtcatgatacagtttaaatagttctcattatactttgatatgatttttttcatttttttaaatggttatttttagatgaaacctaaaactgtactctttactacttgtggtaaaaaagaccctaccgttatttttggcaagtcaggagatgtaaccttagctgtgctggttaaaagccagctttgagagttgcattttacctcccttagaattactccttcccattctttcctcagctccattcctatttcaactagatagttttgtactggacctgtgttccagaaccattactgtctggggagcgactcttataaactactgccttttagaccagatgtgtgtttcagttacatgaatagagaaaagaatgtcatccccctgctatagctgtgtatatgatagcatgaagaaattaaatccaccagcaatctaggaattttcagaaaatttattttcttctactctttatacaaagccaggtgccacattccataaaaagcaaagcatattttaaaattgtacttcttgtttgtccatttatttagagggcttaattagtctgtagccagatattttggatgattcaattcacaaattagattatcgttctgtaattaactgagaatgatctctctgtggtgtgctttatagtgagaattaccaaaggtctgtattcactcggaaaggtcttagttttaaaagcagtctttttaaaggaaatgtagctatgctcattgattttgttattgttgtcctttgagtttttatggtacactaggcattatgctaggtatatgaaaatatgtctctaatccctgttttagacatgataacattgaggctagagagattatgtaacatgcagaaaattgtatagttatatgaacccacggctggtgctcccaaaactcattcatccccttgaggagttcagattctactgattgggagagaaagagctcactgtaatagaatgcaaaatgtagtaaaaattttaaatgaagtaaattgtaaaagtagagatacaaacaatttagtgagaacacagaggaagaagggattaactgtgattaggaggatcaggaaaacataatttatcttctctcctacttctctaagtttttttttttttttgagatggagtctcactctgttgcccaggctagagtgcagtggcgcgatctcggctcactgcaacctctgtctcccaggttcaagtgattctcctgcctcagcctcccaagtagctgggactacaggtgcctgccaccatgcccggctaatttttgtatttttagtggagactgggtttcaccatattggccaggctggtctcgaactcctgaccttgtaatctgcccgacttggcctcccaaagtgctgggattacaggcgtgagccactgcacccggccttacttctctaggtttttaagctcctcctgacttcttaatcttttaatagtatcgtaagtttttcagtaatcaagatttaaatctttgactgtttgtcttcatattcttacatttcatcaatctgtaatgccttttagttcttactgaaaacagtttcttggtagttatcccctaccatttccactgctgtcaccctagttttacctattgctgtatcatctaggccagtgattatcaacctttggtggacctaagaatcatctaatggtgctttgtcaaagtataaagagattttgacttattagtttaaggttatgggtgattcatcaaagttgagaaatacttatctagggcagtggtcttcaaaatgtgatcttgggactgctgggtgtctctgggactttatcaggtatctgcaaagttaaaactattttcgtagttagactaagatgtcatttacttttttcattgtgttgacatttgcactgatggtgaagaaaatagtgatggataaaacttgtagtgccttagctcaaattaagacagtggtaccaaattagtaatcaatgcattcttcactgccacataccagttttgcttaataatgtctttaatgaatcagttaaaatattattattaatttttttatttttaatttttgtgggtacatagtaggtatgtatatttatggggtatatgggatattttgatacaggcatacagtgtgtaataatcacatcaaggtaagtagggtatctgtcacctcaagcatttatcctttgtgttacaatctagttatactgttttagttatttttaaagtacaattaaattattattgactatagtcacctgttgtgctgtaaaattcactctttctatttttttgcacccataaaccatccccacttctctgccccactctccactactcttcccaacctctggtaaccatcattttactctttatctccatgagttcaatttttttttttttgagatggggcctcgctctttcacccaggctgaagtgcagtggcatgatctcggctcactgcaacctccgcctcccattttcaagcgattctcttgcctcagcctccagagtagctgggatattaggtgcataccaccacgcttggctaatttttgtatttttagtaaagacgaggtttcaccatattagccaggctggtcttgaactcctgacctcaagtgatccacccaccttgccctcccaaagtgttaggattataggtctgagcccctgtgcccggccaagtgttttaatttttagctcccataaataagtgagaacatgtgaagtttgtctttctgtgtccgacttattttacacaacacagtgaccttcagttccatccatgttgttgaaaatgacaagttctcattgtttccttatggatgaatagtattccattgagtatatgtaccacatttctttatccattcatctgctgatggatacttaggttgtttcttttctcttgttgcttttaagatctttttgtacttttttgccatgcataaatttttatgtagtaaaatatatttatattttcttttattatgtctaaattttagtcatagttggagagactttcattgcactgaggttagagaggaagacactcatgttttctgcaattatgcatatacagttgatcctcatttttttgtagacttggtgtttgtatgtttacctccttgtcagagtttatttgtaacacccaaattaatgatcttgttggtttcatggtcatttgcagacatgtgcagagcagtaaaatatggagtcaccaatgtgcatgttcccatctgaagctgaataaggtgatatctaccttcttgtttcagctgtcatattgtaaacaagtgttctttttgtcggggatgccacctcttccaaaacacatggtctgagagtgtggaggaatagttttccaaaagaaatagggtatatcaaatactacatgttctcacttctaagtgagagctaaacatcgggtattcatggacataaagatgggagcagtagacactggggaccattacagggggaagttagagggtgggcaagggttgaaaaactaactactgggtgccatgctcactatctgcatgatgggattatttgtattctaaacctcagcatcacgcaatatacccttgtaacaaacctgtgcatttatacccccaaatctaaaacaaaagttgaaattatgttttataaaagaaatggggtatgtttatcagaagaagggggggattaggtgtcagtcagaaacaactgtctactgtaatacctgagtaagcttttattggatagatttgaattggtgaatgaataaattgggtcttggagaaaggaaagggcttgaatgagttctttcagaataggccttttcttttctcaaaagtaccagcaatagcttcccattttttcagaactgatacctctagctttattggcttttatcatctttgctggagggaaatgacgttgggttaagtattgagtgtgaaggaagatagcatgaggatcttgtttgcctgcagctttattcctgcctgctagacctactgccctttaaagacacttgaaagggcttgccccagctttcctcttgactttagggggcaaaagtatgtcattcttatataagagttggatttataagattgtatatcaaattacatactcaagagttggattttgtttgttagtattgtctaaagttacaacatgtaaatagtctgtgtccttactttctaagcctgccattacaaaaagaaaataatatttcctattagagcctgaagcttttttcctccctagctcttatttagggagaatatataatttaagtgtttgaataggaatagaggaagtagccaaacacttttcaatagtccagctaaaatacacaatagcacatgtttaaagtacatctttggaagaaagatttgaagatccttgataagataatatatcatgtaccacaaaggcatgccctgctaagtaaaagtgggaagaagcagtacatattctattagggggtcagaaatctttaaatagaagtttctctggcaatctggttcccagatagatagttgaaggctcaaagaaatttccaagcttgctagaaatttccatctgctggcttttgtgttgagttaaatgccatcatattttattgcctcatacatttgcattaacactttccctttaaatttacttaaagtattttttgttttgtttcatttttgtttttttttgagactggtctcactttgtcgctcaggttggagtgtagtggagctcacagtttacttcagccttctgagtacctgggactacaggtgcatgccaccacacctggctaatttttgtattttttgtagagacggggtttcgccatgttgcccaggctggtctcgaactcctggcctcaagtgatcctccttgccttggccttccaaagtgctgggattgcagacgtgagccacagtgcctgacagtaatatttttttttttattagaaacataagaacccacctcaaagcttgggcttggaagtctatggaggctttatttattttagccacagacatggataagaggcaatctaagttaaatatgtgcactttggtaccaggccaacctgagttctaaccaaatttttcatgttttagatgtgagacaagttaatcttctaggccttacttccttcatgtataaagtagttattattacttaattcaacaaatattattagtcactcttctatgtgttggggtattccagtgaataaaataatgacagtctttcccttagtgcagtttccattctaatggtagaggacggaggatgggggaggcaataaaaaggaattgtatgttaaaaataataattgctgtaagcagagaggaagtagagcagggtaagggagatactgaatacagaagaaaggaggtgcagaattagggtagtaagggttggcatcgttgagccagtgacatctgagcaaagacttgaatgcagttttaaaaggcttgctctggtattgctgagttgagaatagattgcagggcattaagaataaaataaaggagaatcattaggagcttttcctagtaacctaggcaacagattttcttaggctgttcttgcgttgctataaaggaatacgtgagactgggtaatttataaagaaaagaggtttcattggctcatgattctgtaggctgtacaggaagcatggcaccagcatctgctcaacttccgcggaggcctcaggggagcttttacttatggtggatggcgaagtgggagcaggcccatcacatgacaaaagcaagagcaagagagagagtagagggtgaggtgcccaacacttttaaaccaccagatctcttgagaactcactagcgtgaagacagcagcgagccatgagggatctgcccctgtgacccaagcaccttccattaggccccatttcccatgttggggattaacattcaacatgagatttgggtgggagaatattcaaaccatatcacagatgatgataacttaacgagtattatcagtgaagatgctgaggaatcattgaattttgtatatatttttgagattgagacaacaggatttcctgacgatttgagtatgttatatgaaacaaaaaggagtctatgtttttggctcaggaactgaatggatggagctgttatcaactgataagaggaacactgtggacagagcagatttgagggggaagatcaggagttcagtactatatatatatatattgagtttgagatgtctgtttggcattcttgcagagataatgacatctaccaatgggttggttgtgatgattaaatatggtgaatgtaaattactgagcacagaatctgaccattatctctgtgagatcagagaataaattgctacatgaaacaagaataagagattgcaaaagggagatacttagggaaaaagagctcacagaatgtgatagaaaaaaatttttaaatgatggatgggaggataagattgaagaaatctcccagaatataaaagccaaagagatgtaagaatattacagaaatattaaaaataatggagaatctactcaggaggcccatctcctttctaaaaagattttcagagagagagagagatcaaagaaaagggaagggaaataattttatttatttatttttttgagatggagtctcactctgttgcccaggccagagtgcagtggcatgatcctggctcactgcaacctccacctccagggttcaagcaattcttctgcctcagcctcccgagtagctgggattgtgggcatgcaccatcacacccggctaatttttgtatttttagtagagacagggtttcaccatgttggccaggctagtctcaaactcctgacctcagttgattcatctgcctcggcctcccaaaatgctgggattacaggcatgagccactgtgctcagctaagggaaataattatcagtgaaacaatgcaagaaaaatttccagaactgaaggacatctgtttctaaattgaaagtgctcagcaccattaatgagggggaaaaagacatattaccaggacatttcagagtgccagagagtaaaaacaagtcacaaggaaaggaatagggattagtggagtgtcagacttaactcaaaactaacactggaagctagtagacaaggaagcaataccttcaaagtgctgagggaaaattatgacaaacatagatttctaattccaaccaaatagtcaatcaattatgaggatagcctaaagatatttttttagcatgcaaagtgccaaaaaatttatctcctacacatctccccacaggaagctattgaagtatgtgaaagaaggcatgaaatctaggaaaatggggaatgtaacactggagagagagaggaagtttgcaagatgatggtgaacaaaagtccaggatgacagctgagtagcaagcctagagatgactagtacagattggagcaggaaggtggaaactccagggaagatgtctgtacaaaccaaattaaactgatgcatgtgattattctgaaagagtttcatagtttgttcagacattagggaataaactgtccctaacttaagggagcttacactgtaataaggggtacatgcaagtaggcaggcaattatagtattctgtgaaggttcgtaaagtttagtactgtaggaaaccagaatatgcctccccaaaatgtgaaggattctcgagctgaagacagttaagatgcagtagagctctctgcctaaaagcaggacacagatttacagagaaaaatgtcttgctgtcctccctcctccctttctcccctaaagacaggatgtaaattctttactggaaaaaaaccctttatcatctcagagacggcgccagaggaatctgcaagctgactttactccattagtgccttccatatatttacctttccacggtttcccacctctggaagtctgggactgctttcctttgccttgtcacttctctaaaatttattgttctttgttggatatactatataaaccagactcatgaaccactgccttgagttacttttcactgagggcttttcctgtgtgatatgcaccgtacacgttaataaacctatctgtttttctcttgttaatctgccttctgttatagaagtctgtgctaactacatacttaagaaggttgaggaaaaaatactttttctccccttcagttctctgctgctagatcacccatagttggaatggaggctcagaaacctagtatttagctcctttgagcatctgtaattgaactggcaaagcaagagcttggggctgactgttggattagctgaagaatagtttccgtcatattctagaaaagaaagctttttttttctttttctttttctccagggaatgagtggggttatccatttattgtagtttaaaggatttaaaatccatctatatattgataagcattcatcagtttttattttagtatgtatggtgctatcatgtttataagaatattttgtttttaaaatgactagagcggtacaaaggaaaaaactttagttgttaattttagatgaaaagcaactgaatttcttaggtaataattattttaccctcccaagatacgttttctgtactccattgacttatgccaataaagtaatgttcttccaatttaataatggattttttttcttgttgaatttttttcaactctaacgttattttgttgttggagattgattaaaaaatacaaattttactgtttaaagaatgttgcctaattagttataaatctatttcatctttgcatttttttcttttatatactcatataaaatgtagcagtttgtatcacatcagtatttctcttatataaatatggtttatggttatgtctaatctcatttctcatttggccagttaatatatgcacagataaatggcccataaagaaaaacttcaagaggagaaaaaggtaatctaaatgcatattattattttaaagttctaatactgtgtacaattttatgaagttaagtttctgtaatatgtggtcacccaggggtctgagaacattagttaatccagtcaacaaacattgatggcatatgtgctgtatgacaggctctgtgcttggtcttaggaatacaggacaagttagggcatcattcccaccctccgataatgcttagtccccaggaaaaaaaaattgacatataaacaagtagaggtggtaaaacagaagattaaaggtcctatagatgatatttaccaatgaataaagagagaaggctatcttaagaaaaatatgtagtaagaagaaagaaatggagatagagaacatttgaggaaatggcagacatttatttgtatttggttgtagcatagagtaatggggaagaccggggaaacattgagaaccatctcatagagcaggcatgctacatgctggagtttagtcagtttctcctggaacagtatttctcaaatatgtgtgatcatatgaatcactgagaaagtttgtaaacaaacaaaaacaaccctaacagattcctgaatttcactccagacctggaaaatcagagtccttagaggagggctaggaatccgtattttgttatgtcatgtcatgtcagacagggtatctctgttgtccaggctggagttcagtggtacagtcatagcttactgcagccctgaactcctgggctcaagtgatcctcctgcctcagcctccagagtagctgagattacaggcatgagccactgtgcctggtggaatctatatttttaacaagagctctggtaattattattgtaaccaatttattgaacaagtacaagctattagggtataagcaaatatttttccctcaaatgttctagttgatgtgagactttcctttggcatgtattaatgaaagcaaggacataacccacaaatttcctatgtgcatgtacatatgtgcacatcacacacacacacacacacacacacacacacacacacacacacacacacacacacattttgtggttactaaacagtctaggccaggataaaatttagggaattacagcaggtcctcaaataatgttgttttggtataacattgatgactgaaaaaacaaaaaacaaaaatcccagttcccaactggtgccactctctctgtggaatttgcacattctccccatgtttgcatgggttttctcctggtacttcagtttcctcccctgtcccaaagatgtgtgcattgggtgaattagcgtggcccctgtttgagtgtttatgggtgtgtgtgtgttagtgtgctctgcgatgggatggcatcccctccgtggtcagttcctgccgtgtgctctgactaccaggataggctttgctttcagaaatctccagataattagcttcatatatttctgtgttcaggtgctttcagtttctgcagctcagcaagcgtccagctttggatcaagttgccagtgtgtccttcttgcagatatcttcaccttgcaatctgtatgaccaattattttgaagtgccaacttaatgaatgacccttcgtggtgccagactcctaagctctcccttgccttctcttagttctctctttggtagagttggttgaatgcaccagtgagtttgttacttctcagcaaaccttgggggagatatctgaacctaattgttggtgttctcccttagatttgggctttattgcctcttgctgtcagctttgggccctagttactgattctggaaaaagtggaaaaataccccttaacatcttgttagattatgaataggtaagtttaggaaatattattgcaggtagaagaaaacctaacaggtttttattttctaatgtttaaagagacatttaagtaaaagatctcaatggaattatacctttctttttgttgttgttgttgcagatagtatgtacttaatttttttttttttttaaatttcaataggtttttcaggaagaggtggtgtttggttacatggataagttccttagtggttatttctgagattttggtgcacccatcacccaagcagtgtacactgtacccaatatgtagtcttttttttttttttttctttttgagatagagtcttgctctgtcgcgcggcctggagtgcagtggcatgatctgggctcactacaacctccacctcccgggttcaagcgattctcctgcctcagcctcccaagtagctgggattataggcgcctgccaccacgcctggctaatttttgtatttttagtagagacgaggtttcgccatgttggcaggctggtctcaagctcctgacctcaggtgatccacctacctcagcctctcaaagtgctgggattacaggcatgggccactgcgcccagccgtaatatgtggtcttttttacctcacctgcctcctgcccttccccttaagtccccacagttcattttatcattcttatgcctctgagtcctcatagcttagctcccacctgtaagtaagaacatacaacgtttggttttccattcctgagttactttgcttagagtaacggtctccagttccatctaggttgctgtgaatgccattgtttcatttgtttttacagctgagtagtattccacagtgtgtatggggtgtgtgtgtgtgtatatatatatatcacaatttctttctttctttttctttttcttttttttttttttttttgagatggagtttcactcttgttgcccaggctggaatgcaatggtgcgatctcggcttaccacaacctctgcctcccgggttcaaggaattctcctgcctcagcctcccaagtagctgggattacagtcatgtgccaccacgcctggctaattttgtatttttagtagagacggggtttctccatgttgttcaggctggtcttgaactcccgacctcaggtgatccgcccacctcagcctcccaaattgctgggattacaggcatgagccactgcgaccagcagtatatcacattttctttatccactcgttattgatgggcatttgggctggtttcatatttttgcaattgcaaattgtgctgctgtaaacgtgtgtgtaagtgtctttttcatgtaatgacttcttttcctctggttagatacccagtagtgggattgctggatcaaatggtagatctacttttagttctttaaggaatctccacattgttttccatagaggttgtactagtttacatttgcaccagcgtgtaaaagtgttcccttttcaccatattcatgccaatatctattatactttgatttttaaattatggccattcttgcaggagtaaggtggtatcacattgtggtttggatttgcatttccctgattattagtgatgttgagcattttttcatatgcttgtcggccatttgtatatcttcttttgagaattgcttattcatgtctttagcccacttttttgatgggattatttgtttttttcttgctgatttgtttgatttccttgtagattctggatattagtcctttgtcggatgcatagtttgctaatattttctcctattttatgggttgtctgttcactctgctgattatttcttttgctgtgcagaggctttttagtttaattacgtcccatctatttatccttgttttagttgcgtttatttttgggttcttggtcatgaaaactttgcttaagccaatgtctagaaggggttttccaatgttatctgctagaatttttatgttcaggtcttagatttaagtctttgatccattttgacctgatttttgtataaagtgtgtcttagtccatttttacgctgctggtaaagagatacccgagactgggcaatttacaaaataaagaggtttaattggacttatagttccacatggctggggaagccgcacaatcatggcagaaggcaaggaagagcaagtcatgtcttacatggaatggcagcaggcaaagactttgtgcagagaaactcccgttcttaaaaccatcagatctcgtgagactcattcactatcatgagaacagcacaggaaatatccacccctgtaattcagtcacctcccactgggtctctgtcacaacacgtgggaattcaagatgaaatttggtggggacacagcaaaactgtatcattccacccctggagcctcccaaatctcatatcctcacatttcaaaaccaatcatgccttcccaaaagtcccccaaagtctcaactcatttcagcattaactcaaaagttcacagtccagcgtctcatcagagacaaggccagtcccttccgcctgtgagcctgtaaaatcaaaagcaagttagttacttcctacatacagtgggatacaggcattgggtaaatacagccattccaaatgggagaaattggccaaaacaaaggggctccaggccccatgcaagtcaaaaatcaagcagggcagtcaaatcttaaagctccaaaatgatctcctttgactccatatctgacatccaggtcatgctgatgcaagaagtgggttcccatggtcttgggcagctatgcctctgtggctttgcagggtacagcccccctcctagctgccttcatgggctggcattgagtgtctgcagcttttctaggtgaatggtgcaagctgttggtggatttaccattcttcttttttttttgagacagagtctcgctctgtcaccaggctggagtgcagtggcgtgtgatctcggctcactgtaccctctgcctcctgagttcaagcaattctcctgcctcagcctcccgagtagccgggactacaggtgcctgccaccacgtctggctaatttttgtatttttagtagagacggggtttcaccatattggccaggttggtctcgaactcctgaccttgtgatctgcctgcctcagcctcccaaagtgctgggattacaggcatgagctactgtgcttgacctggatctaccattctggggtctggaggatggtggccatcttctcacagctacactaggctctgctccccagtagggactctgtatgggggctctgactccacatttcctttctgcagaggttcttctccataagagtcctacccctgcatcaaacttctgcctgggcatccagatgtttccaaacatcttctgaaatctaggcggaggttcccaaaccccaattcttgacttctgtgcactggcaggcttaacactgcatggaagctgccaaggcttgcggcttgcaccctctgaagccttggcttgatctctcattggctcctttcagccatggctggagtggctggaatgcagggcaccaagaccctgggctgcacacagcctgggccgcacacagcacagggaccctgggcccagcccatgaaaccactttttcctcctaggcctcctggcctgcggtaggaggggctcccatgaagacctctgacatgccttagagacattttttccattgtcttggggattaacatttggccccttattacttatgcaactttctgcagccagcttggatttctcctcagaaaatggattttcttttctatcgcattgccaggctgcacattttctaaacttttatattctgcttcccttataaaactgaatgcctttaacagcacccaagtcacctcttgaatactttgctgcttagaaattttttacaccagatacccaaaatcatctctcttaagttcaaagttccacaaatctctagggcaggggcaaaatgctgccagtctgtttgctaaaacatagcaagagtcacctttactccagttaacaagttcgtcatctttatctgagaccacctcagcctggaccttattgctcatgtcactgtcaacatttttgtcaaagccattcaacaagtccttttttctcttttaaaatagacagatcatgccagtgttgaagggatatgtttccttttttttttttttttttttttttgagactgagtcttggtctgtcgccacactggagtgcagtggtgtgatcttggctcactgcagcctccgcctcctgggttcaagcgattctcctgcctcagcctcccaagtagctgggacaacaggcgtgcgccaccacacccagctaatttttgtgtttttagtaggggtggggtttcatcatgttggccaggctggtctcgaactcccaactttgtgatctgcctgcctcggcctcccagagtgctggaattacagacgtgagccaccacgcctggcggagatatgttttcttaacactgggcaaagaatctcagtttatatagctcactggacaatttacagatcctgaggtcagggataatagtaagtatggattgtgaaaaccttcagtaactcatagattttagccaatgatatgttacaaagtattttatactgtgatattatttcctatgagtcatcccattcctgttatttaagcagtgctcaagatcactatggttcatatccatgaatgtatttcagggtagaataattcttgaatcttatttataagatatactgttgactttaaatgaaagctactcatttaaataggacaccttatataccttggatatggatatttgtttttttctctttaattgtcatattttatatatttatggggttcatgtgagagtttgctgcatgcatagaatgtgtaatgatcaagtctccatcatcatgagtgcttatcatttttatgtggtgtcatttcaagtcctctcttctagttactctgacatatacataatattgttactaagtgtagtcactgtggtctgctatcaaacattagatcttgtttcttctatctaactatgtgtttgtacccacaaccaacttctcctgtcctctccccttgaaccacccttccgagtctctggttatctgttgatctattctctatgtccatgagatgaagttttttagctcccacatgtgaatgagaacgtgtggtatttgtctttctgtgctgggcttattttgcgtaacataatgacgtccaattccatccatgtcacttcaaatgacatgatttcattcttttttatggctgaatagtatttcattgtatgtgtgtgtgtgtgtgtgtgtgtgtgtattatataatatattcattgtgtgtgtgtatatattatatatatacacatatataatgtgtgtgtcttttatggttccatacaaattttaggattttttgtctatttctgggaaaaaatgaatcccacttgatcatggtatgttatcttttgggtgtgctgttggatctagtttggtagtattttgttgaagacttttccatttatcttcatcagggttattggtctgtattttttttgttgtagctttgtctggttttggtatcagggtaatgctggcctcatagaatgagttagggagaatttccttctcttaactttttggaatagcttgaggaggactgatatgagtttttctttatacatttggtagaattcagcagtgactttattcagtactgggctttttttcttgagagactttttgttcctggttcaatcttgatactcattatgttcaggttttctatttttcctgattcaatcttgttggattgtattgatatggctccaatgaatggaggaacaccagtgtccttggtcttgcgctgatttagataaaatgacatggacacatgtggagtgattttaaggagcggagagtttaataggcaagaaagaaggaagaagctcccccatacagagacagagggaggggggctctgagagagaaaccatgtgtgcggtggcaaagtagttagttatattagcaggctggaggaggcggtgtctgatttgcatacagcccagggattggttttaccagatgtgtcattcatgtggcccgtgaaaaacctggccctcccaccttcgtcctttaatatgaaaatgcgggtcaccatgatgtcctgaacacgtgtgagttatctggaggcggccatgacacttggtacttgtggtgacaaggagaagagggcagcaatcgccatgttggccatgttgggtggacctagtttctaatcgccagaatttgcatatcaaagcttgccgtctttaagccgccttttctgttagaaaagaaatggtttgggggttgcttcttacaggaaaatttccaccgagaacctttaccctttctacctgcctaaaaattatttcttaataactcctatattaatgtgtttccaggaatttctccattttctctaggtttttcactttgctagcatataattcataatagtctctgatgatcttttgtacttctggtgtcagctgcaatgtctcctttttcatttctgagtttgtttatttgggacgtctcttcttttttcggttagtcaaggtagcggtttatcaattttgtttatcttttccaatgatcaacgttttgtattgtatttttagtctctatttcatttagttctgctctgatctttattatttcttttcttctgctaatttttggttttctttgttcttgctttttagttttttgaggtgcatggttagattgttcatttgaaatctttctgtttttctgatttaggtgtttattgctataaactcccctcttaacatacttttgctatgtcccacaggttttggtatgttgtgtttccattttctttgtttcaagaaattaaaaaaattttttatcttgattctttcattgacccagtggtcactcaggagcatgttgtttaatttccatgtatttgtatagttttcagagttcctcttggcattgatttctagttttattccattgtgatctaagatacttgatatgattttagctttggaaagattagttttatagcctaacatatggtaaatcctggagaattttctatgtgcagatgagaaaaatgtatattctacagatgttagataacattttctgtacatgtctgttaggtccatttggtctaaagtcccgtttaagtctgatgtttctttattttctgtctagatgatctcttaaatgctgagattgggatgttgaagtaccccactattattgtattagagcctgtctttttctttagatctagtaatacttgctttatgcatatcctcttgctggattgatccctttatcattatataatgaccttgtctttctgtgtcttttttttttgtgtttttttgttttttttaagaaatggggtctcaatatgttttctaggctagtcttgagctcctggcctcaagtgatcctcccgcctctgccttctgagtagctgggattacaggcaggagccatcgtgcccagcttctttgtcttttattattatttttgacttaatgtctgttttatctgatataagtgtaggtatttctgctcacttttggtttccgtttgtgtggaatatcttttttcatttatttactttgagtctatatgtgtcttcacaggtaaagtgcactgattgtaggcagcatatagttagatcatttttaaatcaattcagagagtctgtatcttttaagtggagaatttaatccattaatattcaaggttattattgaggttttgttccttcatattgttaattgtttgctggttttctatggtggtatcacttgaattttttggctttttcacttgtgtattgctttaccagttagttttatatttttgtgtgtatactttgtgtgtgtgtgtgttttttttttccactcccttgagcatttcttgaagagctagtctagtggtgatgaatttcatctgcttttgcttgcttagaaaagactttatttcttctttatttatgaaggataattttgctggatatagtatccttgggtggcagtttttttcttttggcactttgaatatataaccccattctctcctagcctgtgaggtttttgctgagaagtctcctgttgatgtaggctcctttgtaggtgactagacattttcctcttgctgctttaagacttttctccttgtcattgactttatgcagcttgaatacaatgtgtcatggagaagacctttcgcattggatcactggtcttcctgtacctggatgtctaaatctcttggtagacttgggaaaatttcatctagtatttcattaaataggtttttgagcatttttgttctctgtttccctttgaggatactgataatttatatatttgattgctttatggtttcccatatatcatgacgactttgttcattcttttttattctttattcaattttttttttggtctgcctgggttatttcttttttttttttcttttttttgagacggagtctcgctctgttgcccaggttggagtgcagtggtgcgatctcagctcactgcaagctccgccgcctgcattcatgccattctcctgcctcagcctcccaagtagctgggactacaggagcctgccaccacgcctggctaatttttttgtatttttattagagacagggtttcaccgtgttagccaggatggtctcaatcgcctgacctcgtgatccgcctgccttggcctcccaaagtgctgggattacaggcgtgagccaccgcgtcctgcctggctgggttatttcaaaaggcccatcttcaggttctgagactctttcttttgcttggtttagtctattgttgatgcttttgagtgtactttgtattttttcaaggacttcttcagttccaaaattttggtttgtttcttttttattctatcactgtggtaaactgctcctttatttcctgaattgtttttctgatttctttgtattgttttttgaaattctcttgtatctcattgggcttctttagtatcataattttgaattctttttctgggatttctttttttttttttttttttgagacagagttttgctcttgttgcccaggctggagggcaatggcacaacctcagctcactgcaacctctgcctcccgggttcaagcaattctcctgcctcagcctcctgagtagctgggattacaggtgcccaccaccacgcctggctaattttttgtatttttagtagagatgggtttcaccatgttggccaggctggtctcgacctcttgacctcaggtgatccatctgccttggcctcccaaagtgctgggattataggcgtgaatcacagtgcccggcccagcatttcttgaatttctttttattgggatgtgttgctggagaattattatgttcctttggaggtgtcatagttctttgctttttcatgttttctatatccttgtgttgacatctgcacacctggtataatagttgcttcttcaaattttttatttttttatttttaacttttcttcaacttttgttttagattctaggggtacatgttcaggtttgttacaaagttatattatgtgatgctggagtttggagtacaattgaacatgtcacccaggaagtgagcacagtattcaataagtagttttcaatctttgtcttcctccctccctcctacctcatgtattttccagcatctgttgttcccatctttatgtccatgtgtacccaatgtttagctcctgcttttggattttctttcataggagatgtatcaatggtgctagttgggtgggctctttggctttgattctgggtgcattcagttgtgtagtctctgtattatttctttagctataaacaatatctgtgttatctgtgatttcctccatggtttatggtgtggttattagtggagcttatagtgaagtttggtgggacagggatgctaggcaggccactttttgggccctattggtggtagcggtgggctgatcatacttgttcttaggccccagcacagtgtgcagtggcactagttttagtgggaccaagaggttcaattcttggctccccaggtggcttgctcagatgctgaggtggtggtggcagaggtggggtgggcaggtgagcaagttctcatgtccctgggaatttggtatggtgtgggtagtggcagcagcagtgaggagaagaccctctgggtcccaagcagtatgtgctaatgttgatggtggctgtgatgcagggtcactatccacagccccagacacacagctcttagacttgtccactcttggcagcaacagtactgtactgctatgccaaggaggggaggggccccatgttcacgtatgagtctaagcatggaggccacaccaccagtgggggcacagttactacttacagccccagacaggcagctcctccggcttgtccaccctggcccctggcaatagcagcagtggcagcggctgtagtggtgtgcagaggaggagagaggctcctgttgtatatgtgtaaacctgagcacagagaccactccattggtgcaggcagggtcactgcttccagctccagacagctattatgcttacccatctgggttcctagtgacagctactgctatggcaatatgcagagaaggggaggagatctttccacttgtgagcttgagcacagaatttgtgctgcctttccggtagaatgcacctttggtacactgtaactttttggtacactgcaccattccctgaggagtagtgttttccatgggctagaatactggggaccctggagcacctttgggtccagccagtgctatgctgctgtagccatttgagtcaacactggggttgttagtgggagatcccagaatgtggagatatggggcctctgatttccaggtcaggatgcagtcctatgacagctgtgctctcacagtagtgctctgcagtagcagcttaggccttgggggtgtgactgacccagcatgagttccttgtctggtgcaatgcccttgtgggtctccagatcaccacccttgctagtatcagggtttgtgtgggtagaggagctctcccatggtttggattgctgcagtccacagtggggacatggattgttaaggttctctcacttacccttccctatgataatgagtcccttggggctcatagctgatcttggctgagttggtcacttgcttccttctccttctttgcctcaggtgtttcctgtgactagatcctgttggacactagtgttctcttctagatgttctattataggtgtgattattttggttatatattagtaattttggttctttctggagagggtgagtgtccaatctctctagttagccaccttgaatacatctctgctgaggagttcaggaagagcagaagctacctctatgctcctgctgagtcaggcaatgcctatacctttaattctaccagaattgaagtaacaaatttgtctactttagggcaataaataaagtcaatatacacctgactacaaagcttcgtagactatcaacatcagttacttctgacagcttggttgtagatgtgaaaggaaatgggttcattgtatctgatgctgccgttagaccaagctggcaccacagaagacctggaatttgttaatactgcttaactttcatgtttcctggtacaatcaggatgaagggaactgtaaccactaggtggcatcttttaattagaaaactgtgaatactccattgctcactaggatccttgtggcctacttagcaaagcaattgcctgtgagagcagctggtggcagtctttaagatgcagatttcaaataggagagaaaggaagagataaagataaaaagagaggaaagaagtgggagggcaagagaagagaaaaggagaaagtaaacaggcgtactgtgaaggaagtagtaaaatgccatcagtaattagctcaggaaagtggtatttatggcatttgttgcttaccattgtttcatttctttatttatttgacacgtatttaatgggaattaggaattctggctgaggatacgagatgctgtttctaccctcagagagttgatagctaaagggagtttaaaatatctcaacttaaaatcttgacccccttcctgtagagtatgttaaataatacatgaaataataccttttatttttagttttatttgtttcgtattctctatttcattcccctatcagagaaaagagtttctggagtactctagttgacatactttgaaaattagccccttgagggcagggagtgtatattattgaggaatctggagcatgttgttccatccctgactcttattgatgggggggaatgtccatacgttgaacgaatggtaggatcagatgagaaacctcagcaaggtgtctcctggttatagtctacagccttcctggctctttgtagaatttaggcttctgactttgaatgctttcctgacagcaccatactctcctctgctatatagcacactatcatattgcctgtttacgaggcatttgtgtttctccacagtgatgaattcttttatggtagggtctgtttctaatttaatttatttatgtagtttcagtgtttagcaggtggtgagtgctcaataaattttggttaaatgaatgaataaatctgactaattatagtgtacttggtataagataaatttgtataggaatccttttggagagagttaatttttggatatgccagaaagaccatcctttaagattttttttacatatgtgaggatgattaggcaattactttgagtgtaagatatggtgcactttcaaagataaccagaagatataccagttgtatgctagagatggatttgtagtgccaattctacaaatacaactcttaaaaaagtttttttttcagagacagtcttgctctcttgcccaaatgggagttcaatggctcgattatagctcactgcagctttcacctcctggggttgggtgattttcctgcctcagcatcccatgtagctaggactacaggcacataccatcaggccatgctgattttaaaatttttttgtagagatggggatcttgctgtgttgcccaggctagttataaatccctggcctcaagggatcctcctgctttggcctcccaaagtgttgggattagaagtgtgagccactgcccctggccaactcttttaaattttaaagtggattctgttgcgttgtcttagataagtagcccagctgcagtcttcttgtttcttttttctaaaataataggcactgatgacatctattatttgctccttcaggatctagggcctgccgaggacttcatcttataaagatgagtatgagaactgagacaaggtcaagtagagtagtaaaaggtgggcagagagggatttcactatggcggaattctattataccagaggataatgtcagtaggccaacgtctgtttgttgaatgccagaactttcatattcaagaatatatattagaaaatagatgtcattttattaatagacctttttagaaaggtctatcttataaaggacacattataaaaagccttcaaaaaacaaaaattttaacagctttttgagatataatttacataccatacaattcacccttttaaggtacacaatatagggttctttttttagcatattgacagattgtgcaacgatcaccacagtctaattccaaaacatttcaccaccccaagaagaaaccctgtacccagtagcagccactctctcactctgcatttccaccttccccaagcccttggaaatctctatttgctatctctatagatttgcctgttatggacatttcatgaaagtggagtcatataatgtgtgttcttttgtgactggcttctttcatatagcataaagttttcaaaattagtgttgcagcatgttatcagtattcttcattccttttcattgccaaataatatactgttgtatagatagaactcattttgtttatccatttatcagttgatggacatttggtttattttcacattttgggtattatgaataatgcagtaataagcatccatgtacaagcttttgtttggacatatgtttttatttctcttggttatatccccaggagtagaattgctggatcatatggcagctctgtgtttaataatttgaggaactgtgaagccacttttccaaagtcctaccagcagcgagctagggttccagtttctccacatcctcactaatacttgtcatctttttcttaaaaattacaataatccttgtagtgcttgtgaagtggttatgtcattgtggtttttgtttgcattttctaatggctgatgatgttgagaattttcaagtgtttattgaccatttgtatatctcttttggagaaagtctatttaaatctcttgcccagttgtaattgggttgtctttttattattgtattttaaagtgctcattttatatgttggatacaagacccttaatagatatttgattttcaaatattttctcccattctgtccttttactttcttgatggtcttacttgtagcagaaatatgttatatacacatatatgtaaatgtaatatttatagcataatgaaataaagtagtttagaaggatttgcagtagggtgccatgaaggggataacagttgtcttttattgaaattcaaagctgagccctaaatccatatgtaatacaattatgggaagccaaaaaagaacagaagctgctcagagtgaaacataatgtcctacagcacatgacacaccttcttcctgtctttgtgatatcccagttacaagctagttagagaaatgatagggattggggtagtgagaaaagaatagttgtttcctttggtgtctcaggtaagatatactgttagagatatagctagaaataaaaccaaccggttctagcagagatgacgataattctacttttgtcaaatcaccaccagagaaatctcctctcagttgattaacatcatgtgccgcaggctgtttctttcttttactctaggtatagtgggagtaacccattggcaagaaaaactcatatttaggtggtaaggggaaggcaggtagagaaaatgaagtgtgtctttgacacagtatgaatggaggtgctccccattaggaattgagcaggtagactgtgttgatgaacatagagtaacacgctgggatggttgtggccacttgtctgtctcattggtccatctctcccagtattccatttgaaatccttcttcagccccttaccacagcttcaggttgatattgaaatacaatggtaatagtgagggtattttaaaagtggactttaaagctgagttacattaagaaatgggcatatctggcaagttacaggcacaggtaagtaacttttttttttctttttttgcattaggggtttgaaatagtgcaccgatggccttctgagaaaggtgtctaccttctcaaggtttttctatagaatgacttatcaaaatccatatggattcttgaccgaggcttttcagctggattatgtgaaaagctgtggattttgtaaagaagcctggcatgtgctccagtgtgtttcagtttttaaattttcattttttacagtgtgagaactaattccagactaataacatttatgtgaatagttctctaagctttgcttcctaaagtgtaactgttaagccttctggaataacaatgcagttctcccttcagaaagattctttatgttgatgtcttgtgactggcttaaattcttcaggcactttctctcctggttcctctccacacccagagagagattttagataatcttgtgcattgagcagaatcaagagatgagtcaggaaagttttctaacaaataatacttttgacggagccatacaacttaatttcgattttgaagtgacagtaattgtcagtattgctccttcaagtggagggactaatttgtaatcatgagcatattgcataatggcgacataattgagggcgtaggcctatcctttagaacatagcccccaagagaattgtgttccatacataatataaagatatgttaaggtggttgtgaaactccttgctgtgaaatagtaggggcttctcagtcattttgtgtatagtttgctttgtagatgatgctgtatttcagtagaaaacagttgatgtctcaatgtcatattggcatctgtggttgagaatagctcaaatactattgaattaaacttgtgtgcgtgacagtgtgcttgcccagacggactccttagcactgtatgactcttgagaaaatggtctcacttgacaatttcattgctacctaagatttttatttagtggctgaggaagtgaagtagtgacttatactgatttgccatctagggagataattggtaaacttgggcctgagaaaggaagagatctgttatgtaagaaaaatactgatcaaaagaacaatatttgttgttgttgttgaccagctctgactgtgaaacatttaaagtgtctgggctctaatttgagagactagttgaaaaataatcatttgacatttagcactctgctaggtaccgggaaattagagcaagtaagaaataatttcatatcttgaggtacttatattagggggaagacagacatacaggcagatatttttttctgatatattagataaaggctttactcttccccgcccctgcccccctccatgtggaaacacatacaaacaggagcaaaaaagggaataccaaattcattttaaatacatgtagatacccaatatgtaatatgtgtcatcttactctaggatgtgagctttaaaaaggtggaagccaaattgtgcatgcttttgtatagatccttgcataaactagatagtatatagaaaattgacagtagtaagtgaaatgcttgattccttttaagaaagaaaattccaagagttatgttaagaacttctttaaaaaaaggcaagagtgaaaaaaatgcacaattcagaatagtgatgatcattgcagggaggcaggtagatggctttcggtaggggcccatgtatagcttcactgggattgtgtttttagttagcttgggctgctgtagcaaattaccatagattaggtagctcaaataacaaacatttatttctcacagttctgaaggctggaagtctgagatcagggtggaagcatggttgggtgccctcttcctaattatgtcttcacatggctgttcccatcacagggactccagcttcaagacttaatcgaaccctaattacctccctaaaggccctaggtctaaataccattacattggggattagggttttaatacattaattttgggaggacacaaacatttagtccatagcagattggaaatattttaattcataaattaggtgctgggttcattaggtatatattctgtaattatgcctcataacatacattatatatatataaaaaaataaaaagtatatatataaaactgtaacatttgatagatgcatatatatatatatatatatatatatatatatttttttttttttttttttttttttttttttttttttgagatggaatctcactctgttgcccagcctggagtgcaatggcgtgatctcagctcactgcaacctctgcctcccaggttcaagctattctcgtgtctcagcctcccaagtagctgggatcacaggtgcctgccactgcacctggctaatttttgtatttttagtagagatggggtttcgccatgttggtcaggttggtcttgaactcctgacctcaggtgatccaccacctgccttggcctcccaaaagtgctgggattacaggcgtgagccaccgcacccagccttcccagtctgaatttcttaaaagcttttgcttaggttaagttgtgggagaaaaactgaactcacccagctagccaaactatctctctgttgtctttccactttatccatctattttttactttttttggaaacacaataacaatagtgtagaagtcttttcacattgcctgactctcctgtttgtgtcccataaggttccatgtactctgtccagaactcagcttattatgtcaaaggattctgtctggactggtcagtcagagatataagttctcattacctcagtgtgtgtgtttgtatctgtatttaatgatgtttgtgcttggcttaggctggggattttgaaatctttgcagagtttcccaatttgttgggcagttttagaaatgatagtatcagtaggaaaaaaaaaacacagaaaaatacaatttcttctttcatctatgtcccatattatacaaatgttcgctgaaagcaccaattttctgggaaaggttttgactcagacttttttcaccctttacctctactctccaattcatgtttccttcttacaacgtggtcatatgcttgcccaggcctggcttatgaaccgtgcagaatatttgtggggtttgttttttaagccctaaactgtgcacatgatgcagtatttaatttggaatgagctcttagtttagtcacatgtgcttcttgtggtgtttatcttggaatccacaagtaggagggaagtatttttgcattttatacatctggacattgttcatggtccttctgtaacttgggaattctgtgtgaggcaaaatccaaaaaaacagcattaaaaataacacggagttatgatgacatctgagtcaaaacccttgagaatacccttctgatcccagcagagtttgtttttgaggtggtgaactttttcaattgtgtgtggttcactgctggcctgaggagaatgctgggattataaggttacctgacacccttgcatgtagactaatgggtttccagacattctgaaagtctattgcagatttggcatagggggaagattttgctttttggcttagggggaggattttgctctaattttgcatggggtaaaataggtaaagtgaattctgctcactgttgctatgcctctgccacaagcattctaagagacctgtgagactgtccctatttctctcttaaacttgcctaattacagccagcttagagctaaagttgactctgagaatgcctcgggctctgtgtcaggactgggggtttagtaaccttatccttcccctgatttcacatgagaagttgttttaaacaggattggacatagagatatagcacagtacctcctccttttggctaggggtctgctaaagtggaaaaagtgggaaaggatgtacagaaactcctgctctttgagtgagtttgcatatggacagtattgctttttggccccagcctagttttctttcattcccatgtctcatcttttatgcagctgcagagagcaggctgggaaagcagaatgaaagcttcaaacagatttgcacttgaataaaagaaagagtgatttctcttgttcagagtacagaccagtttgggtagaaaactgtttgcttttttactttctgggtaaggactgtttgcttttctctctttaaatgtagtaaagagaggaaaagctaataaagtagttggacctgctggttataattcatagagaattttcaagtgtgtttaataaagtctctcatataattataacagaaataagtaattggaggggaaaggttaaaatcctgtagaggtttaagaatcagttaaatatgaggcagtgtgcttggatgagacaactaactaggagctgcttctctttgctgatttctctgaactttccttttgagattttttcctctttactttcgtaatgcattttgcaactttcattaaaaaaatccatcaatgtttaaacttctaacaaataaacatatcctagtcctattatggaaatcacaatgtagcagagaatagcttgacttcagctagagagaggttaatgataggaaccctaaggattgataccaagatcatgcttgtttagtgttttaatgactccagaaggaaatggtgaaatctgctgatgacaccaaattgtttttgctgatccaaacaaggatttctgggaagcttcttcagagtatttggaatagtagaagaattgagaaatatggtggcagacacactgaacttaaagtgaaggtttacgtgaagtagcaggagtaacgtcaatacgttgaagttacaaagcctgccaaatcttccaaaaggaagattacggagtctatagtttcatgaaaggaagacttaagacaaagaacatttatacatatagcaaatgaaaactattatgggaatagttgcaattataaagttcagtgacttaaaaatatgatgtctgaatttctttttaaatgtcagcagtagtatatctaaataggtgttgtttctctcgaaatggtcatagaagattatatacccattttatgcatgctcctttcttggtacgttcttttgtcagttttctgtggtggcaggtctttattttgcaggctgttttgaattttgaaacagtcaactgtcacttaaagccaagtgtgataaataagatgggtggtcaaactaagtaatagatttaaatatattaaatatattaaatgaaatataaagtagtaaaacttattttcttttattgctttcaaaagtgattctaaaggacattaccaatgagaaattgcaaaaatgtttgtgtactaatagtgttagattaagttcttggttgatagatttcacaaacatcacttatttagatatgtaagttacagggcttgtactaatacacattttattatattggagacaaaccatgtttataagtgacctttttaaaatgttttctttatgctccctaaatatacacttagggaggaagaaggaggttttgaattaactggagatttccctaatgtgttgaatttttctgactaaagcctacatttttgtaaagaaaaagaccctgtgggataaaaaatacgataggcactatcacaggagctgtgggctggccatctatatccatccatctatctattattccacccatccctccatccatccatccatttatttaattaagttatttttaacggttggctctggagttgacattcatttattttaaaagaacagtgaatcatagctcttttcctcaagatgcttgcttttatttgcatggtggcatattgattaagtactcagaacactatttgacatatggtaagccctcaataaaagtttgttattattatgactgtacttctcccctctaatgtatagaggtaaacattttggttcctattgtgacacgtgggttataatgagttagggcctacttaagaagaaagtggaaagaaagcgggtaaaattgttgctcagatactagcatgtgggtggagatatagatatagatataggtatagatatagatagtgtaggtatttacatctaagtatattgtataaagtgacggattctgaatttgctacatttctcatttcttcagcactctgggataaaaccagcaaaaatgatgtgatctgaacagacacagtagatggcgctgtaggacttagtttttaaagaaaacagtacagccagggggagtgggggcatggagtgggaagaaaactaaagcacattttaatgggctcttttgtaccaccaagacaatttcatcttagagtacgtgcctctaagaagtaaagatttttttttttttttttttttgacagagctggagaataattttaggaaaactaaatctccctgttgctatgtttgtgccagctttgtcacttggaaagtattagttgttttaagccacaaatatataaggaagttattttctttcaaaacattgccttatttatgagggttttgtttgtttgttttagctgtctttgtctctgtattttaatatttttgctcctagcttttttggccctttgttgtttcataaaaacgtggttgtaaagttaatttgaaccatatcaatatgactataatgtcatattttaaaattcagctatattttaataggccttaaaaatacaggtttacattaaagagtaacatagtgtttttgatactaccgtagtgtgtttatgtacttgatcttatttaatcttagtactaattgtatgaattttattattcacttttctaggtaaataaactatatcagagatacttagtaacttgccaagctcacatacctagtggttgaactagtagttgctgcaagagtttcgccagcatattaaagttgtattttttgagcacttactgtgtgccaggcaagctaaccactggaaatactatagtgtccaaagctgacctggaccctgcccttatggaccttacagttattagataccccacagacattttttgaaatctgctggattgagagtgggtcatgaagatgaatttgaatcattgtgattgttggataagccagagagccctttcaccaaaaagaaagtaagaatcatacctaccttgaatatattactgtattaaaatatttgttttagttgtactccctgtagccaagggaaaggcaagacctcctttggctacaatgagtaactaaactgtcttctagataagaatcaggaagagtaaggaaaatctggctatactataatgtcaaaattttccactgattaaatggtattaaaatatctaaagcaagaaggtgttagttagcagtggaagtctgagagattaatgtggtttgtgtacagcctaagaccatgttaacttctaattggcttctctagtgccatttggtgagatcttttagagtacagccagcttagtgataccccaaattgccaagtacccctttcatcttgggacattaattgtcaaaaatctttgaattgatttttcttcagaaagcttcactttattattttcacacaataccaagttctcatgatatttatgggtatgtgattggtgagaaaacagaccaagagttgttttttgtttgtttgttttttgtgacgaagtgttgctttgtcgcccagactggagtgcagtggcgcaatctctcctcccgggttcaagcgattctcgtgcctcagcctcccgagtagctgggattacaggcacacgccaccacgcccagctaatttttgtatttttagtagagatggggtttcgtcatgttggccaggctggtttcgaactcctgacctcagttgatccacccgcctcagcctcccaaagtgctgggattacaggcatgagctaccatgcccagcccagaccaagagttttaaattgaggtccatgattgggtttcagtaagtgtatggaatgtctaaaattatataaaattttatgtgtatgtacttagaattattctgggaagaaagtccatagtctgcacaaatttctcagtgagtttcataacccttaaaaggttaaaagtggttgtaactagactttatcaaaaggggtgttcaaaagtcactccagttcaggattgtggaaagataactgtcttctcaaataggcatcttagaggaagggctgtttgggttccttttaagaactgtaatcttgagatgtggagtgaatttgggatttgaaaatcccaaaatagagttttggaactctcagctcttagtgatatattctgttttgaaatgagggatacctttcggggaatttgaaaatacttttttctaattcaacttttaatcagataaatgattatttttgaaaaatgaaatagaaagtaataggaaagggggaaaagttgttatgtctcttcgtggaataaatagctaaagaaattaatttctaaattttaaatttcatccctggttaaaatagttcctcttttttgttgttgttgttgttgttgttttttgttttgagatggagtctcactgttacctaggctggagtgcagtggtgcaatctcggctcactgcaacctccgcctccccagttcaagcagttctctgcttcagcctctcaagtagctggggctacaggcactcgccaccatgcccagctgatttttgtatttttagtagagacatggtttcaccatcttggccaggctggtcttgaactcctgacctcgtgatccacccgcctcggcctcccaaagtgttgggattacaggtgtgagccactgcacttggccaaaagagttcttttagagaaaacaaaagtctttgatataagcaatatgatcatacaaatggatattgtgcttttttaaaacaaacaaaacacacaggtttaaggagagaaggtatggatatactacttctgtcttccctatcttctgccatattctaagctttgcatatgttctcctgaggaacaggatagttataacttaaacttgcatttatatatttctgattaagttgttaactatggttctagatagaagaataaagaagtaaaattagatttcttaatttgatatatttaagtcccttattttgatctaatatatttgataaaatagtaatcttttaatagtagccctgttatacataataataatacctatcagatagggttgtggtgaggattagaccatatagtaaatgtaacatgtctagtgctgtgccctgaacttaacacgtgcttattaaatattaactattgctattaccattatcatcatcattaataaacatctatattttatatccccatgacttaatgtacagtataaagcataaatagtaaaattacccaaagacaaagaggaatgggaaggtccagttgattagcttcttgtttagagaagcagattattccgggggttaggaaatagtttcctgtaaggcatgtttagctttcattcatggattgatggcaatataaatcgctcttttgatgtgagaaaaatataatgatggcattacatcaattataaatttcatgagggtagggactgtgttcggtttaccttgtgtccttagctcccattttaatgtctgacccatggaaggcatttcattaaatatttgttgtcatctgtctatgttttcttctttgtctttctttagcttccaaaaagagttgtttttatattcataatttcttatttcatcagtaatgtgactcccctagaagtattggttaaaatacagatctttcttggaaggagactgttttgtttgaagcaaatgacttgggagatgacttaagaacattcaggctttaggtgtttttgtagaaagactaatatttggtcctaaaaaacaaaaaaaacttatcttcatctgtcagaaaattcctaatgtttagcacttaagttgctttgtgttctgatgtatatattataatggaaaaatctgcagcctaaaaggtagtgttttcaattagatatttaagaaacactttctactctcctactttagaggaaaactttacatagcccatttatcttcatgtcttcttgagtcagcaaaacatttacaactataggaaagaagatgtttttcagaaatgaatgctgatcaaaaagaagtatagctactgtggcaaaattaggtaaatagttctatttgttaaggaaaaaatctgtcttgtggagttgtatataaagtacgaaattgaatatatagttatatgttagtgttcctattgcatactagagtctggatatacataggctcagagtaatttgttatggtccacaggaatatatattttaagatggactctcctaagagtgagaggtgatcctacagccagtggcttgcttggttgtaggatcagatgtgattaagttcagagaggagacattttgaacttctctggttgtagaaatgctgcctccctatttcctacaaatatacagtgaactctggatgtcttctgggacagagtagaaatacttgcaacaggaattggggtctggagatatatgcaacccagcagcactgttataaatattttggttttggtagcaaatttgcttacagtatacagccataccttgtagatatggtgggttccgtgtcagaccatcacaataaagtaactattgcaataatgtgagtgatacattttttttggtttcccaattcatataaaagttatgtttatactacattgtagtctattaagtgtgcaataatattatgtcaaaaaagcaatatataggccgggcacggtggctcactcctgtaatcccagcactttgggaggctgaggcaggcagatcacaaggtcaggagatcgagaccatcctggctaacatggtgaaaccccgtttctactaaaaatacaaaaaaattagccgggcatggttgtgggcgcctgtagtcccatctacttgggaggctgaggcaggagaatggtgtgaacctgggaggcggagcttgcagtgagctgagatcacgccgctgcattccagcctgggtgacagagtgagactctgtctcaaaaaaaaaaaaaaaaaaaaaaaaaaagcaatgtacataccttaatttaaaagtttttattgctaaaaatgctagtgatcatctgagccttcagtgagtcataagctttttgctggtggagggtcccctctcaatgttgatagctgctgactgatcagggtcgtggttgctaaaagttggggtggctgtatcagtttattaaaataagacagcaataaagttcattgaatgatgcttgaatcaattgactcttcctttcatgaaagatttctctgtagcatatcatgctacttgatagcattttactcacagtagaacttcttttaatattgggatcagtcctctgaaaccctgccactgctttatcaactaaatttatgaaatattctaaatcctttgttgtcatttcaacaatgttattagcatcatcacccggaatagtttccctctcaagaaaataatttctttgctcataccttatccctcatctgttcaagtttggtcatgagattgtaacaattcagtcacatctttaggctccacttctaatttgagttctcttgctatttgtatcacatctacagttatttcctccactgaagtcttaaaaccttcaaagtagtccatgagggttggaatcttcttcgctcctgtcaatgttggtattttgacctcctaccattaatcagaaatactcttaatggcatctagaatggtaaattctttccagaagaatttcaattttctttatccagatccatcagaagaatcacaatctatggcagaaatagcattacgaaatgtatgtcttaaatagtgaaacttgaaagttgaaattattccttgatccatgggctgcagaatggatggctgtgttaagaggcatgaaaacaacattaatctccttgtacatctccagcagagctcttgggtggccaggggcgttgtcaatgaattcttttcaaaatattttgaaaagaatcttttcttctgagcagtaggtcttaacagcgggcttaaaatattcagtaaaccatgctataaacagatgtcctgtcatccagaccttattgttccatttctagaccacaggccgagtagatttagcataacttttgggggccctaggattttcagagaatggccagtgagtactggcttcaacttagaaagttgccaactgcattagcctctaccgagagagtcagcctatcctttgaagttttgaaaccaggcactgacttctgctctccagctatgaaagtctgaggtggcattttccccccacctagtgtgaggctgttttatctgtatggaaaatctgtcgttcaggatagccaccttcatcagtgatcttagggagatcttctggataacttgctgcagcatctacatccacacttggtgctttgcttgcacctttatggaatggcttctttccttatacctcatgaagcaacctttgctagcttccaacttttcttttatagctttctttcctctctcagccttcacagaattgaagagagttagggccttgctctggattaggctttggccttaaggtaatgttgtggctggtttggtcttctatccagacatttggtcttcttatcagcaataagactgttttgctttgttagcatttgtgtgttcactggggtagcagcacatttaatttccttcaagaatttttttgtttgtattcacagcttggctatttggtgcaagaggcctagtttttgccctgattcagcttttgatacgtcttcctcattaatcttaattatttctagcttttgatttaaagtgagagatgtgtgactgttcctctttcttgaacatttaggggccattttatggttatttcattttttttccatttttttgtctaacgtgattcagagaaatgtagagttattaaatggactaattttcatatttttatgtctcagggaatagggagcccaaaggcaggcagcaagacaggagaatggctgtcctggtggaacagtcagaacacatagacttatctattaggtttgacatcgtacaggagtgtggttggtggtaccttaatagtaatatcaaagattgctgatcacagatcatcataacaggtatgacaataatgaaaaagtttgaaatattgtgagaataagcaaaatgtgacacggacatgaaatgagcacatgctattggaaaaatggcagttatagacttgctcagtgcatggttgccacaaaccctgaatgtgtaaaagaccacaatatatgtgaagtacaggtgaggtatgcctgtacgtagttggtgcctgtagttttgtatccattgaaatatactgtcactcattgggtctgcaattgggtgtaataataatatcattttattgttaatgggctttgagtcttcctctttcttctgtgatagtttgccattgtcaagttaaatttttatgagctttttcagagcagaaattaaacattaaatggtttattaaccaaaataaggcaactgcctttagactttaatgtagtacccattttttcctacagcttatcgtcttcccagtttaaaaggcttaagcagaagagtaacagtatagttaaaagtttttaagttacaaagttggaacttgcctttttttgattatatgatcccaagagtcacaagagagtaggcagaaagattactgctttatcaataggtgaaagttcaggtttatctgaatttagaatattaaattgtactttaaccataccacatgtttttataacatataaatcataactgacttcatactattctgttattttatgaggtgatctgatgtggctgcaaagttgttaaagttaaccttgaagaaacctcctatggcttagtgtttatttgcaaaatcaatcacattttttcttctgccttattagactgatgaaatcattttctagcatatggaaacattcctggacctcctgttattttgcgtaaataaccccatgtgactcacaaatgttgaaaaagcagtagatatttccaaatgctattagaaccatcaaactaatacaaaaaattcttcggtgggacaaatgaagaccagaatgaagtctaagtcactgtttccagtgaagattagtcactttttccactctaattccagaatttctttaatttttcttgcttatgttagcaacagtattgtcacaaaagattcaacagtcatctcctcaggtaaccaattgttacacaaaccatatgtagaaaatgctcactggcttcatttatagaaaaaaaaaaagataactggaagttagaaacagttgtccaaacttttgaactataataagctattttgaagtgtcattgtcaatacaaagtacataccagtgtgagattttaagcagtaataaaatctatgtgtggaagagtaaatgaagcgtttctgcaatattaatgaacggacagatatatgggaagaagtgatattaaaccttgccatacactctgacaatgtacatgaacagagccagtttgcttgtaaagattagtaacatatcattgcaatagatgtgcatcctgtggtctaaacttattcctaaatgacatcttgaagtttggcctgtccaaaaacatcttttgaggaaggacagatgctatagctgctttcttcaaggaaaaaaaaaaaagtaagtgacatcacaccttgttttaaacttaatgaagtgaagtaaggatgtcctctgaaaaactggccggaagtaggagtagtaggagggggaggaaaaggagaaggaagagggaaagaagctctttaagaaatagaactagttgaaaatattagtatctaatattgtcaggaacatgacatataagagattattggcagagtgcaacttcagaactcttagaggattctaaaagcaaaggaaaaaagttttttagtttagtttagtttagtttttttgttttttttttaataaatgcttactacttctgaatcagacattctttggcatcttaaactgaatgcctgtaattacattagctgttttgtgagacttacatatattctagtcctgtctagtacagaacactatgctaagcattgcagaaagagcaaaatggatattacttctgtcctcagagaacttatctaggaagaggtagaatataaatattcaaacatctatagaaaaagcagaatcaaccatctaagaggactgtgtagacaagacagatctaatccttttattaacataagtgcttcatgaaggaagtagatgtgaactggacattatggtgtgtgttgaatttggacagattaagatgggattggggtaggagttaggcttttgacaaagaaaacagcatgggcaaagatggagcagaggtggagatgtaggggatatttgggaacaggaagcctgatttagggtgaagtataacttttatagaggagaatggtgggagataaaatggcaagtaaagcttagagccaggtcatggagggttttaaaaatgagaatgaagatttgaactttattctctagcagtggggagtccatgaagactttttagcaagggcttggtaggagctagtagctgtgctttagaatgattaatgggaaggatatagtggagtcgggagaggttagaatcaagaattaaaattaaggggccattgcagaggcccaggtgagagagaataaggcctaacataaggtgtggcagtggagacggaaaagaaaagtgaagcatctggtagacagaatcggtagaactgagccatgattgtatgtgggaagtgagggataagagaattggaacaatatttgcatctgagtaactagggcactggttgtaccattaacagaaagaagaaaattaggaagaggagctgatttgggaaattaagaagatgtattaagtgtttgagatgaatgtgtaggggcatatgagaattgcaaagaagagaaagggacaggaagaaaagactgaaaagaaatgtgtgctttgagaaatacacacatttttgagtttgaatagaagaaaagaaggtggcagaagtggtcaaatcagggagaaagaaatcaggacagcatattattaggaagtctctcttgaggtgtgtgatcttgttttactccaactactgtggttttcattgtccttgcagactcttctgtactccatggttatagtaacgctctaactcaaattaattccattgttctttctattgaatcatcacagaagctgttaggactgataatccacagaatgatatgagggatcagaggcttacattctcaatgccaagattatatatactattcctgaccttaccaggtaggtaagattctttgtgcttaattccgcactcaggacagacttggtgagtctgttgcttattttcctgtatcttattagtgagggaaataatattagccattttgtaggtttggatgctgactctcgtgtttgctttctaaatcagcacctgatctggaaaccaagagatgaaagaatttcagtgagaggctagtcagtagcatcatatggtccactctccagaggagaagacagatgaaggttaagaaaagactccactaggtttggtggttttgaggtcactgatggcctttaagaagatagttttaatactatgatgtgggtgaactaatccaagaagttaaagaataggtacattttaaagaataaactttccaacacagactactctttcaaggatttaggagatgaatgggaggatagagatgaaatgttagctataggatcactagggtcaagggaagacttttttcttttctctttaaattgaaaaaagtaagcatatttgtaggcagaggtaaaggagtatttggagaagaagagaaagaaagtactggggagtagggggttaactgttggctgatagatcttggaggaatctggaacaaatgatatcaagtatataggttgagttattgaccttgggaaggaatgtttagagatcagaggagtaagaggacaggagatgggtggaggtatagggagaggacagatgctgagggaggatatatcagacctcaggcatctcattaaaaaagataaggccattggccaagaatgaggaaaaaagagataggagaaaaggtgtaaaatagttgcagtgggaaataattaaaatgaggtaaactcagctgaggacagatagttgattttatttcttgcctttttctagtaaaattcagttttactagaatttgtttttgcttaagaaagttccatgaaaggctgcattcagaaatatgaagaattttattgtcagctaattcatgctgatgtacatatcttagatccagaaatataaatgatgatagtactattactacttagggctggatcacaaaaagccaatatgcacttaggatttgaaggtactttcaaatgttataaggaaacagtttcatcagggagtagttgtaggaatgtagtttggaattttgtcaagcatatcttttctgtcaatcaaaggcatggttttgtatgacacagtgtctaactcttgcttctgatttcttctgtttatatgaaagatatttctctaggtttggaagtataccaaattacatgcctaatgtgtaaaagatgtttgacttaattcaagaagaccttaattttcagaattggtgatgataaaaatgaaatactacatatatcaattgctgatagttcagaaaaataaaacatattagattctatgtagctaaaattaattgtatttaatgaacttgacaaacactatagaacaaagcagaatttaccagcttagaggactgtgtagacaagacagatccaatccttttgttaacatgaatgtgtcattaagaaggaacatgtgaactggacgttggagtacatgtagaatttggacagatgaagatgggattggggtaggagtttggcttttagcaatgaaaatagtgtgggcaaagatggaacagaggtggagatgtaggagatatttgggaacattctttccctagttcctttcctgaaagtaaggactttaggtagctttttgacactgtggtggatactcagttcaggtaacatctttttttgttttactttaacttggttgtctgttttttagttttcacttgttatacttaaactgggaagaaaatttaaaaaaacagagacaccagattctttaaattttaagagtcagtattccctttcagtttaactgaatgttaaatgttttaaaatgttaagtatctggccgggtgtggtggctcacgcctgtaatcccagtagtttgggaggctgaggtgggtgaatcacttgaggtcaggagtttgaggccagcctggccaacatccctactaaaaatacaaaaattagccaagtatggtggcggccacctgtaatcccagcttcttgagtggctcaggcaggagaatcgcttgaacctgggaggtagagattgcagtgagccagatcatgccaatgtaccccagcctgggcgacagagcgactccgtctaaaatgaaatgaaatgaaataaaataaaataaaataaaatgttatgtgtctactatctataagatgatgatgagcaagataaaattccttttctcgaaaagtatgtaatctgttaagagacatttcacgtaggaaatttgaattatttcagtaaactatactttaaagggcaatcaatatattaaacaatataatcaaaccaagtcatgcataatatcttatattcctattgtaactaagagttgcactgtccaatatgttaaccactaactgtatgtggctattaaaatgaatgaaaaataaaattgaaaatttagtttcactagttacatttcaagcattcagtagctacatgtgattagtggctagtgtagtggacagcatagatagtgagcatttccattattgtagaaacttctgttgggtagtgcagctctagagctatagaacatattttaattgttttggacaggcttgtccttcatctcttcaacaaaccttcattaaatgcctaccatatgccaggtgttgtgatagagtgagatgataaagtcctagttcctccttacacaaacctttcaatcttgtgggacatcaagtcagtgaatgggtgaataagatagaatgtgataagcatcactataagaggagagatacaagaggatgtgaaaatacacaaggaaaagtacagaagcaacacttaaggtttccttttgtagaaaggtgagtaggtgttggcatggttaagttggagataaagcagaatccaactgcaggaaatgcttggatgtgaaagaacatggcacatttgagggactgaaagttgttgactgtatctggagcccagataatttctaaggtctcttaattcacagtcattattaggatacatctaaactatttaaaaaacactccttcctttttcaaaaccaaagggacaaagatccccatgcaccttccatctatttggggagcttcttatttttatatctgtggatcctacagtcaaaggaaggcaagagaaagtgaaaagaaaataaatttgaaaaagaaggaccaaagaaatgaagatggccagaggaagttttagagaaataaaacaggtaacatttgatggagaatgatagtaccatttataacactcggatcgctgtctccagtcagaagtgaacaccaaccattccaaaagctagtgcccccaaatagtttacttggtatgtgaaatataatatgtgagaatattttttgatatgggatttaaaaattgaatttctgccctggttcatttcagcagaaatcatagtagaatttgctttactgtaattttcgtaaatgtatacctttgtagtgtatgcaatatggaagaaatttacattctattattttgtttttatagaatacaaaatagtcacagtcaggttaaaacttacatgagaagtcagagagagagtaggatcaggaaacaaaagaattgtacgttcattcagtcctcaccaattacagagaatattatatgtattatacaaaatacattgcacataataaatctctcacattttgtaaatatttagctgttgttgatttatttctgggctaatggcagccgtcacgtctctggtctgtgttgggaatgtctgtttatatgtctgtgtcacatcatctgctctagcatggaggcttcatggaagacaggaaccatgtctgtttattttgtgtgatagtaacatggagctctatatatgaagctttatttttatttgatgatgatgatggtgatgattttctgtatgaatttctttcctggcttcagattgattgaatcttctgatcactattaatccagtggaactcagaagtggagtttacttttgagtgcttagcctggctaggcagcaggcttttgcaaacacggctatatgagatcttatgccaccacaaagaggcactctcttgaaaaaagatgaaaaatacagagaagccacccacattggttttcatcaaggaaaagtttggtgtctagtcttaccaccaagtgcttgtcaaataaacttggtttgaagtcaagactgaatacagtaaacaaaaaactcagataaaagctatagtaaaaaacaatatttctctttattttcattccttttcttatttgggacaaccttttgaatagtgtgggatgattgaatgtaaagttgatgaggtgaaactgtagccaagtgaataaggtctcagtgctttttaaggatgccctagctctaaacaaattttactattgtatcctacctgtaaaatatttgtctttgtaaacttgcatcactctaaattataaaactgggcatccaaagtcattcatatggacacaactattaagtttagttttatttgttagaatgttcaagatactactgataaggaagcttttaaatatttccttgaaaacctttctttcctctttcaccttgcctctactgccctttctctagatcgatcatgaatttttctattatatttcaaagaatctttagggtttacttgccacatcttctattggagtccatttttcacatcacatttttttgtattaacccattataaatgatactacttcttgtattatttgatttctatgttcatttttatgttttattctataacctattgaggtttatacatataaaataataatcacctgctagtgttaccaatgctgattatgatttttgaatttttagaatgtttgtgtttgattctcctgatttcctttggtcaatatttttttttttttgagacagagtcttgctctgttgcccaggctggagtgcagtggtgcgatcttggctcactgcaagctccgcctcctgggttcacaccattctcctgcctcagcctcctgagtagctgggactacaggcgcccgccaccacgcctggctaatgtttttgtatttttagtagagatggggttttaccgtgttagccaggatggtctcgatctcctgaccttgtgatcctcctgcctcagcctcccaaagtgctgggattacaggcatgagccaccgcacccggccaatactttcttttgaaatttatgttagccttgaaaaataatggtaagccgggtataaatatgctgatctaaaagtgttattagttgacatagttaaagttgataaaacagtcaaaatttaccatgctgtcttctttctagcatatctatattttgacaatgaaaatggttctttactaattatatatttgcttattcctgccaataataagacattctttgtaaaagcactttaaaacttcatagaaatatgaccgggtgcagtggctcatccctgtaaccctagcactttgggaggccaagacaggtggatcacttgcggtcaggagtttgaaactagcctggccaacatggtgaaaccctgtctctactaaaaatacaaaaaaattagctggccatggtggtggtgggtgcctgtaatctcagctgcttgggaggctgaggcaggagaattgcttgaacctgggaggcggaggttgcaatgagctgagatcgcgccactgcgctacagcctgggcaacagagcaagactccatctcaaaaaaaaaaaagaagtgtgtgtgtatgtttgtgtgtgtgtgtataatagaaatatgcaaacataacgttctatgttaagtgtataaatatactacttgacagaaataatactgtttctgttgagcagatgcagaatcaagttcagagaagttgaattgcttgttcaaagtcatgtaatagtaggagctgagcctcaactttataaatggtttgacactactttacttgatctttctataacatcatttcatctcttcctttaaaaattcagaatcgttatgattgtttcctttgtcacctttattttcttagtcatcaagaagactcttgttgttttcagctcagcacttcaggagagcctatagtttttatctttcactttagaaaaatagatttttgttctaggaccctgtcccaagattttaggaatttgatagcatcaacatgagtttagatatagcagtttacccacagtgtatctaggataaaataaatttaagataaatatatttgcaagaacactggatagaacttagatatattaattaacaatttgccacactcagaggaactgccttttttctttctttttctttttttagagacagggtctagctctcttgctcaggctagtgtgcagtcttgcagtcatagctcactgcagcctcaaattactgggctcaagcaatcctccaacctctgcctcccaagtagctggaacaacaggcacctgcctttatgcctggctaattttttaattttttgtagagacagggtctgactttgtggcccaggctggtctggaactcttggcctcaagcaatcctcccttcttggttcccccaaaatgttgggattacaggcatgagccactgtgcctggctacagaatttcctaagttattatttgttcgtttgttcattcattcattcatttattcaagacagggcctcattctgttgttcaggctgagtgcagtggcatgatcatggcttactgcagcctcgacttcctgggctcaagtgattctcccacctcaacctcccgagtagctggggccacaggtgtgcgccaccacacctggctaatttttttatttttatagaggcagagtctcgctatgttgcccaggctggtctcaaacttctgggctcaagcaattctcctacctctgcttcccaaactgttgggattacagacacaagcgaccatgcccagttggaatttccttttttcgatacagttttgatgaagaaattttctgagggctatacttgctaaagcttgaaacagaagaacaaaattggtcactaagaaagtaggagaggttttcattcatatccactgtgtatctgtgtctcagacaaagatatgctggctatcagaatgctgacattgcttactttcctatttttcaaagactgaacaccatacacatagcttgaggaaggatattattcttgtatacattttgacataaagatgtttagtccttggctggatatttcagttctctgaaaatgtgtagctatcctgtgagaagcaaacatcttggaaacagtatagtatagttgaaggaaacggtcctaccgtttccttgcttagacaaatcatttcatctcttcttttctcagtatttttttttctggaaatctactctttttctagaaatatgtatacaacatttaaatttgcatgtgtctgtcaacatcagtgtgtaaacatattatgttcactatgaaaacatttaggaaattcagataggcaaaaaggaaaagagatcgctgactacagcagaaaactataacattctgataaagttagataaaagccttttgggcttttatagtacatgtatatgcacacatacacatagactcacacacatacatgtacctacaaataacatcttaaaatgagttcatattgttaaaaagtgagtttatatagctaaggaagcacatctgaggacaagaacacctctattgcaaaactaacagatgatatagaactagtatggaatacaatagaggtgactaaaaatttaatggtttggagtgaaagcgtggaataatcacggtaaacacaggagtaagacacaaagatgaaagcaatttggttaacaatgatctgatatgaagttgaaaggattactggtgtctttgaggaagtggacccaacaaatcaaactaaaaaagtatttggagaagtgatatagcaaaacttcactgaaatgaggaactgaacctgcagatcaaaagatacattgaatcctgaaaattggtagagaaggttcaacatcatgtcatatcctgattgttgccaaacaagagaaaggtttcttcagtcatgtaagcaaaagcaaaagttatctataaggaagaaaagcaaaagttatctacaaggaagaagtttagactggcctcagacttcacaacaatgtgcaatactacaggagctatgtcaacacagttctgataaaagaaattacggcccaagaacagtgtacccagccaagttgttgttgaggtataaaggccacaggcgtatcctctcaaatgtgaaagaacccagagaatatagtatctgtgagacctttctgaaaaagaactaattgttgaaatttagccaaccaagagaggaatcaaaccaaaaaagtgttgtgatattaaataccttcatatatatatgtaagatttagatactgtagaaagtgtggcagtacaacagactgtaaacactctacatcatggcaaagtaaaacaaatatatacaataaaaattggaaggtaggtagaagggaaatgggaatgagagattattaatcttattcatagcaacaattcaatcagaactgtctcaaatgtaaagtagtttaaaagtaatgttaatctattctttgtggttttgatcatttttcttaaagttagagggactttttcacaattaatgtttcttgagtgaagaaacatttgtctaagatttaaaatttcttcagtttcatttcggcttctgttaattgcaggtaaaattagaattgatattttttatttttaactgtgaatataatctcatcccagaaagaatacatttatttctgtccatccattatctatgtgtatatgtgtatccatgtgtatagaattgatattttttatttttaactgtgactataatctcatcccagaaagaatacatttatttctgtgcattcattatctatgtgtatattccagttgtctggaataatgtcactaattgctaatctaatacctaatatttctcaatggtgagattttggatgatttaatgcatcttttctgtgtattttttgtagtatttgaatttatataatgagaatattttaaagaaagtgatacaatgaatttattgctctgaaaaatgaataaatacttacgcagttttatagcctcatttcttttttaacttatcttgaccccttttctcttaccatcattttaaatagttgcacagtattttatggatgtgttaatatatttcttctttcattcctgatctcagtttcttcatctgtaatgacagagctgaactagattagccggttgcaatctttctctttaaactatgaaatccttccaagaaataaacagtttataactcttggcttaggcatttcccatagaatgtagtttcaaagctgtacagattagataatttctgaggcttatttcattttaccaccaaaaattagggtttttcttttttttaggatttttttgagtgactttttcatgtgtttaaaaaaaatcggtaacagacataatcttatgaatcagaattttaaagtgaaagggactttgaaaaccatctagtatatttgcctaacttttatacatagggaaaccaaatttaagtttttaaactaacgtcatacagccaactgaaatgaatgagacttgagtgcacatctcctgactttctatgctgttcttttccctacagtacacataaatatatatacatatatatttatacaatgatgggcaaacaagatgacaattttattgtactcatgtcacatttaaaccatcatgtaaatgtcaggaaatatgcttaatttatagtgtatttattttcttgttcatgaaaagagatcagtactgcagccattattgaactcctagagttagaaaggaaagtgagtgggattctggcgagaaagaaagcatttacttgtcaaagatttggaatttactgtggttaccaaaattaaaataaaactaaaacttgacttggcagaagattaaaaacaaagcagctccaaagtgtgtgcacatcatggagaagatgccattattccttcaggcagccaaaggggaagggaatattgtttctttgcgttgctggagctgatttatttagttatgatttcaacatgcctacagggcacaccccagaaaacattacacaacaacattaaccagaacaaatggtgctttctttttctgtatctcctcctaaggttttttaacagcagtgaggttttttctttttctttttttttcccccatattgttaaaatggctctgattatgtttgactattgggtgtggcaggttttagaatgttaagtggtagtacaggttcctgaacaagaaagagaattagagttgatgtgacttgattattggaatgtgtagaatgtaaagttgtgagacatacgacggtctaccgcaggttgctcttagtaatggaccttcttgttaaaagccctgttattattgggaatttattttggaaactactaaagaagaaatttgacagaaaagtaaaacaaaccaccttgtctcatatttcctttctacacaggcactttgaagagatatcttaaatattgtcaagtctcaattatcctggcacacgttagcattatcaccattctcacaaacttgaattaaatgcacatggtattgcagcaggtgcagcacagagaaaattggcaaacaagatccttatccttttggagctcagtaagggttgctatcctagtaagtagttcaaccaatcccaaactaatttttccggatactctccaaacaccctccctcccttcctatatcctctgtcttcattagtggcctctccatcctctcagctggaaacctcacattcatcttgagtctttatgttcccttggtcttcacaaccaatctgtcaacaagtcctgtttcttctatcactaaaattgctttttgactttgtttgtactcttccctccattctcctagccattgccctgtttaggcccttttcatcttccatttcagttcttggagagctgcttatctacttttaacctttccattttctaatccatcctccatactcttgtcaaatctctttctttaaagacagttctaatcatatcactctctggtttaaaaacctttgatgggtccccattaacacataagggataaagtctaaactccttagcttgtcatgccagggtttcagagtctggctctgatctacttattctcatctcattacctgccataatttcccccttaccgtatttcccattgccagacgcacacacacatgtacatttactccattcccacaagcttcctcataattccctgagcttgctatgtaattgtgcttttgatcatgcctttccttgccccatatacacagaacactcttccctgacaaactcttgcttgtatagaggaactgaggaagccaagattttacaaagagtactcttgacaaaagaaataaaccacgtgcatagaccaagcagtagggccaccgttagagcagagttcagactagtggctgccgactagtttctcttgggcaaaccaggaagaaggactcaatcccagaaggtactggcattatagcagtgattaaattggtttgcaatagtattaaatgaatgcctccttcctatttatacagccaagagttagcatttacttttatagctaaaggatagagggaaatagctacagtaggtttctggcatagtagttaatttcaagaattaaaagaaaactcattacccttatctacctactactcctaccttatctcatgttccaaaggtgtaaagaatgattaggaactcacaggaccacgagccttcacactcacattggtgctttttaaaaatcaccaggatagagccagagatgatgggtttaaggggtaaattgaaagagggaaatagcagctctttacctcaagttactgaggaagcagaggcctttttcatgctctgcctagtcatgcttctccctaaccattgcatctttctgctcaacctttgtcctttttatccacatatgattcttttaaaaaattagttcttactatataagtattgtattaacatagtatcttcaaaacatgtggaatgtttgtaaaggcttctctgacattctctcaccaccatcatccccaatcccagctgcctacccaccaatgccagaaaatgacaactattttcagtttggttttctgttgcttcagacctttctctatgcattgacttagagatacatgttgtggatagacaaataggcttatgaaatatagtattgctgtgtgtgtttgtatgtgtacgtgtgtgcttgctttcctcacagaatcagtatcatacttactctgcctctcagtttgcaaacttgcttttttgactctgcccgtagatcttggatatctttcctattagtatgtagagataatttatcacagttttttcaacttcttacatacagtattatatttaggtctagcttaaccctttcctcttctcatagcaatctgatatggacaattagaagagaaaaaaattttagtaactgtgttagtttgttttcatgcagctgataaagacatacccgagactgggaagaaaaagaggtttaattggacttacagttccacttggctggggaggcctcagaatcatggtgggaggcgaaaggcacttcttccatggcgccagcaagaggaaaaatgaggaggttgcaaaagtggaaacccctgataaaaccatcagatcttgtgagacttattcactaccacgaaaacagtgtggggaatactgcccccatgattcaaactatcttccaccaggtccctcccacaacacaggggaattatgggagtacagttcaagatgagatttgggtggggacagagagccaaacctcattcagcctctggccccctcaaatctcatgtcctcacatttcaaaaccaatcatgccttccttatagtcccacaaagtcttaactcatttcagcattaactcaaaagtccacagtccaaagtgtcatctgagacaaggcaagtccctttcgtctgtgagactgcaaaatcaaaagcaagctagttgtttcctagacacaataagggtacaggcattgggtaaatacagccatttcagatgggagaaattggctaaaacaaaggggctacagggcccatgcaagtacaaaatccagtggggcaaattctaaagctccaaaaagatctcctttgactcagtgtctcacatccaagtcatgctgatgtaagaggtaggttcccacagtcttgggcagctctgcacctgtggctttgcagggtatagctcccctcctggctgctttcacaggctggtgttgagtgtctgtggcttttcaaggtggaaggtgcaagctgtcggtggatctaccattctagggtctggaggatggtggccctcttctcatagctccactaggcagtgtcccagaagggactctgtgtgggggctccaaacccatatttcccttccacactgccctagcagagattctccgtgagggccctgctcctgcagcaaacttttgcctgggcatccaggtgtttccatacttcttctgaaatctaggtggaggttcccaaacctcaattcttgacttctgtgcacctgcaggctcaacaccacatcgaagctaccaaggtttggagcttgtactctctgaaactatgcgctgagctgtaccttgaccccttttagcaatggctggagtggctgggatgcagggcaccaagtccctaggctgcacttagcatggggccctgggcccagcccatgaaaccattttttcctcctaggcttctgggtctgtgatgagaggggctgccatgaagacctatgacatgctctggagagattttccccattgtcttggggattagcattcagctccttcttgtgcaaatttctgcagccagcttgaacttctcctcaaaaaatgggtttttcttttctactgcatcatcaggctgcaagttttctaagttttatgctctgtttccttttaaaaatggaatgcttttaacagcacccaagtcaccttttgaatgctttgctgcttagaaatttcttctaccagataccctcaatcatctctctcaagttcaaagttccacaaatctcaagggcagggacaaaatgctgccattctctttgctaaaacataacaagagttacctttgcttcagttccaacaggtccctcatctccatttgagaccacctcagcctggactttattgtccatatcactatcagcatttttgtcaaagccattcaacaagtctctaggaggttccaaaccatcccacattttcttttcttcttctgagcccttcaaactgttccaacctctgcctgatactgacttccaaagttgcttccacattttcaggtatctttaaagcaacgccctactccaatggtaccaatttactgtattagtctgttttcatgcagctgataaagacatacctgagactgggaagaaaaagaggtttaattggacttacagttccacttgactggggaggcctgagaatcatggtgggaggtgaaaggcacttcttacaaggtggtggcaagagaaaaaaatgagaggatgcaaaagtggaagcccctgataaaaccatcagatctcatgagacttattcactatcacgagaacagtatgggggaaactgcccccatgattcaaaccatctcccactgggtctctcccacaacgtgtaggaattatgggagtacaattcaagatgagatttgggtggggacacagaaccaaaccatatcagtaagcaagtactggttctgattaaatgcaaaaaatgttgcaattgttggtttcaggaggagtgttatccttaaaaattagactgtcttagaaacacttgttggacccagttcaaaggacttcactagcattaacactctctctcctttctttctccttaacccacttctacccaattactgacattgatgggagttaaatgtaaccaggactctttgtttatatatacatctggttttccctgttccgtatgcctaaatcctccctccattgcttctgtttagcatttaatgtaaatttccaaattaattcaagaagaaaatttgaaatatataagatgagggcattaggtgatctctgagggcttttacagctctaggattctattaggttattaataatttatttccagaggatacattctgataaactaagaagttttctgtgcttgatttagcttttacttaattaggaatataaataactaaatatttaaatagataaaacttatgctatttgtcactttttcttgaagcatatttataatgatcatttaatgttcaaagtaaacctccaaaaggacttggtaactgccaaatattaccaccaaactgtagactaatcaattagaccactagtatttgaatttttttcttttactatataaaactaagaaacgtggactgaatcaaagtgaatgggagctttggataaaatattggtaagatgtttgcacttactgtctgcttttgaatgttcagatatttaagaggtaccatcatataccacgaacaaaaggttgggagtcaggaatcagggaattagtcctagctcatcactgtctcattttgtgattgcaggtcatgctttgctcttaaattttcccatctttagcatgtagtagattatttctgacccttaacttacccagggatgttttgtgaaataataaagataaccactgccagttattttttgctgctcagtaaagattctacacaaattaatggtagcagtagggtggttatttcattatttaagaaagttcttcaaagtgagagaactacccagcataggtcatttggaattgctgtttatttgttcttttaggccagcaaaagtgttctatgttaggtagaacagtgctaaaaacttacataaaagcaaaggttttgtaagttgtaggagccagtccttggtggatctagttctttccaactcttgtttttagtcatctgcttttataaaagtgagtggtcttaccttttagttgttttttttttcctaaggtagatttttatttttatgtttattcatatattctgtatgagttctgtcatcttgataaaccttggaatagaaagtcatatgtaaaatttgccactttacttgaattctaacactttttgtgatgttaacctgttagattctcattctaaattccacttctcaccttcttgtgattggttgctgtttgttaggaaaacatgtaacagattcttaccctctttgaaaaatcactgttgttctttttgttgatgcagaacagcagtaattttttctctttaaaggaaaaataatttagacaaaggagatacttgagaaaagagtttaaagaaatttactgttttctcagtgtacttcttttcaaaatgatgtcaccccaagtgttataattctttcaaagcttagtgtccaactggtgaacaaaactaacagttgattgcctcaagttcagcagtgtttgctgtatattttctacatctgtggactattctgttatgacataaaagctattaaagattataatttttaaactatatatttcactaagtatttataaacacgtatgaaactcgttctaagtataacctgtactgaaatgaactgttcatgtttatgactcagtaggtaaattgctctggagtgcttcagaccaggctcagctgaagcaaagcattttgaattgatattgttaggaaaggttttttttccttattcaacggttacatgcgaattttaaaagatttcttgtgtttggttagttctaaatttaaatttgttatacttcttatactagtagaatgtttcctttctatctgcagatttgagagttggtcttggaatatggctttgcagattaaaaaaaggttacttttaaaattcctcttaaactttataattcaaatcagtcaagtaaccaagaagagaaattagagaggataccattgacttgctttgtatctgttgttcttcctttccttctctgcaaaggtaaactgaattgcagctttgtacttagaagtaaattactattaaaataaagacagtttaatagtattttagaaaatgtggaaaatggaaagatgggaatgaactataaaagatagaatttgagctgagtcttgaagaatacattgttcttgatgtattccagacttccccttagacgttttttattctttgtgactgttgtgtgttatgtgactacttaggtcatcctccctcagggggaatagttggacgtttattctccaactactatgtaagcaccatcttaatatttgcccttggatgagtcacatcactctgctttgccttaatttctccatctgtaaaatgataatggctatataattttagatttattgagttcagtggaggcaaacctttaaagtatagagatggctttcactgtgaatgaatttaagataaaagatagcattaccacaacagtgcatttttctacctttaacacatatgttaaccacatttttgtgggggcacaaaaataaggatttggcatacaagataatttgagtgccttgtacgtgttctagctggcaataatcctaacccttgtactcagcatctggtttattcatgagatcccctgtaattaaccagtagtacttctcagtcttgtcttttaggaagatttatggtatacctcaggtggtgtcagatagcaggcagaagacagatgagtagctagttctctttatttagaaaaaaattctgtctccttgacaccaatattgttaaataagatatgatttctaaaaagccattttccctgtttatttgacatgattggcagctctactatctgaacacctaagaagtttaagtttcttaggtgtggttttagagtcttaggaaagctgggaagggcctagactttagaggcgacaggcttatggtgtgtcctggagtgttacacaaggaagaattattagggccaggtgcctttcatgtctatgtctgccaaagtaaaaaatgcagaggcaagagtttgtctcagcaatagtttcatacattatctacacagagaaaagtgactatttaatactggcaagaattcaaatactttctatgtaatcaatatcaaaagagggtaagtttgttttttgattggttatcaagttgatatacagtcctattgctgtggtctgcttaacctgtaattatcagagaaatcttgtcaaacaagattttctgaaatgaagcctgttaattatatcagatcctttggttttatgtggaactattatcatgtcatgaattgggaaccgtttgaacaaaatactgatttggaaaactctttatctcaaattttgcttgaaacccatgacatctaatggaaagggcatggtgagaggcaacactaaatttctaagctgaactcttttcctaaacatccctcagtgatcattctcttgtatgagtagatcccaacaagggtagggattggttagtttcagggcatcttatctaaacattcgtctaggggcaggtctatgctggttagacacatagaaatcaaaattatcaacacagtgatgacaatgtaattggccatatctatcagcaacttataatcaaccatatctaaggctgctgaaaggtacaccctggtaaaaattctggctctacctttgactttcattactgaccctaaggattttggactgaagtctgtaagtgagcttgaattcaacctggaatctgctttgaccttgtaggtaaatagtgtgcaaagttaggaaattagaacaaaataaaatttactttacagctaggataaattgtgataaaatgagaaattggcagcaagaagttttagtgaataggaccctcaaaggaaacttaaacaatgttgaagtgatgtttgctgccatcagacagcacacacacacaaaaaactatgtctaaactgttaaagtggattttatgtaaattgttcatgataaacatttgcattatatattcctattcctttgtacttcccatttgatgaagttttcaaactgtggtttgctggaggggaaaaagaaaacccaaatccaaaccacataggacaaattgaattacaaacctggtgtggtcccttaactcaattacatctaatttgtgttattttagtcatcctgggtggcagctgttctgagtaaatgcccacaaacattttcaatgtaagaatttgtcctgattacagctctttaagatcagtagtagcctatttatattttaagtggcaaagttttagattaatttggtgtatcaggaccattttaaaaattcaaaatttagttgtttcacaaatagacatttaaaaagcaagcatccaatgtttattttaaatgttaatttttgtaacttcacctcattttcttatttcttatgtttctacttatgtttcttctaaacatagccacttaattactttattcaggcatttatcaacttgcatatacaagggaatatggaattttagattcagataaatgctttgacattccaagtcaaaatttgagatgatctgggaagaaaaacatgaaataatatgggttcaggattgttcagttcaatataattaaaacggaggtttgtgttagaactaagttaagattgaatattaaatacaaaagaaatgaagaccttgaaactcatgaaagtcttgtggaaggaccttgactagtgttctaaggtagacaaatgggaccaggctaaattttagggaattacaatgaagagatactatccagcagagacagtaatgaaagaaaactcctattacttcaaaaatgatagatggtacatgaatatgtttaaaagccattgtttttctactaaattcagtaactttcagttagcaactgaatatcttttatggactagatattgatctatgtactgagacttcaaagatgaataaactaaaggttcctactttggaggaacttatactgtagttaggatggggaacatgtaaataatttatagcaacatatggtaggtgatatgataaaggtttgaataaattcaaagctttttcttttgtcataaggagggtataggcctaaagttagggtattagatcaaaacaagtgaaatttttgtttaaacttactacagtacatgagacttatacttcactagatatttaatcagttaatggtcgacccatagacttaggaatataaattgtttaaatttgaggtgtttatcagttgtgtacactttttccctactcattctctttttatggaaaaaacaatttggtaatcaattatgatatgtattttcttgtatatctcttataatttttaattagttgtgaactgtatcaactttaataacattttaaaagatgttcatcatcctatattcctcttttatatgtgatactgactactaatctactatttatttttgaaattatttttggtcttcagtggtagtgtgctttttttggtttctctcccacttttggagagttgatatctgctttgctggcttcacatctgtattagttatcaattgccataacaaattaccctaaaacttagccgctttaaacaatgaacatttattacctaatggtttctgtgggctagtaatatcgtatctgtcttattcacatgtgaatgatgaacattcagacatccgataaatattattgaatggtgcacaaatgaatgctgttattcaagttgaggttcttatcacttagcacctaatgggctccaccatcttctttgctggcttccaatccttacccccatgctgtttgtaaaaccaccctttcaaaagaaatttatgctgctgcttcccttattaataaccagttgtgactctcattggcctaatcaaatttctgttggtctccttggcattcaaagccttccataaaccagccttatcatatttattcaaccataaaccttaacagatatacctattttacttaaactggttgtttatactttagacctgttaaaagacaatccttaaccaaattaaatataactcagtttaattgagcaaatctggcggcttcttgaacccgagtagtctgagagagactccattgcagccacgtgctggaagatttatggacagaaaaaggaaagtgacgtacagaaaacaaaatagaggtacagaaacagctggattggttacagctccgcatttgccttatttgaacgtagtttgaacagttggccccctttggccaaaactcagtgattgtcacaagagcagattacagtctgtttacacatccttttagattatagttcacactgtgtagagaaacctttaggctgaatttaaaatatgtaaggaggcagctttagggtaaacttgatttaacagaccaaaccttatccccatccctaatatcatgttcagttttactttcttacctttattaatgctttattccctcatctgtaatgcttatattccttgctttttcaaatgttgttgattcttgttctccactcaaattctttatgtttcttgcacctctttcataaacccagtttggacttttctggcccactccagttgtttttgttttcgcttgatttttttttttttggttgttgttgtttgtgttttgagacaaggtctcactctgctgtccaggctggagtgcagtggcgtgattatggctcactgcagcctggacctcctgggctcaagcaatcttcgtgcctcagcctcctgagtagctgggaccacagatgcatgctaccttgccaagataatttttaaaaattttcgtagtgatggggtctccctatgttgcccaggctggtcttgagctcctgggctcaagcgatcctctcatgttggcctcccagcatgctggaattacaggtgtgagccactccacttggctcaactctagttttttgttttttgttttttaattttattttatatatttttattattattatactttaagttttaggatacatgtgcacaacgtgcaggtttgttacatatgtatacatgtgccatgttggtgtgctgcacccattaactcgtcggattaaagacttacatattagacctaaaaccataaaaaccctagaagaaaacctaggcaatacaattcaggacataggcatgggcaaggacttcatgtctaaaacaccaaaagcaatggcaacaaaagccaaaattgacaaatgggatctaattaaactaaagagcttctgcacagcaaaagaaactaccatcagagtgaacaggcatcgtacagaatgggagaaaatttttgcaacctactcatctgacagagggctaatatccagaatctacaatgaactcaaacaaatttacaagaaaaaaacaaacaacctcatcaacaagtgggcgaaggatatgaacagacacttctcaaaagaagacatttatggagccaaaaaacacatgaaaaaatgctcatcatcactggccatcagagaaatgcaaatcaaaaccacaatgagataccatctcacaccagttagaatggcaatcattaaaaagtcaggaatcaactctagtttttaatctttgaattctcgttgcattaacactcagtaccaaacagtgcctttctttatttttaattagtttaagtgggtgaatatgtctttccaactagaattccaattttctgacagcaaaatccttttacttctcgcatctttattgtagtgtgctgtgagtgtatcctggttgattgaaaaactagaaatgttgattcacctgtatgtaaaaaatcctttttgagtgaattttaactgctagagacattcatgaggatgagctgggactgcaggacagtttggaactacattttattattttcctgaagaaacattgctgtatgaagagattaactttaaaaagttccctccggccaactatcagaattggcttttagccttgaactatcaaagcaaaactttcagtgttgcctagagcagaacaggtattaagtagcaagcaattcaaggtctctgatccctagcctgcttcagctatgggcctggccaagccctttggcaaagataagttgaataaggaatttacttttatcttctccctcttggaagttttatggatttgattcacaaagaaagggcaataattgaaattttgtgttagcttcttcttgttattcaccaagaaaagttaaagtcaggtaatgatatcaatcaaaatgtaagtacacctactgcctaaaaataacattgtggttaattgtgttccataatattcttggcatactttgcacaagccctggagaacaaagcctgagagcccatgggaaataaagctccagttctttcggccactttaaatttagttctgtgatcttgataagatatcattgtatttacattgttagtttctaccagcattcccttgtatcttcttttatggctttttctatttctgtgcctttttgttcctcttccttattttccccctaaagccataggtagaatgtttggttttagagttttataagaggagtatttgacttttccttatagcgatctcagatttcattaagtttgtgttttaggatgatttataatatcagtctatgatttgggctattatttgcacatttttggctttcctgtggctaaactactggtgtttatataaaaaagatttttttttatttatttatgcatgtaggggtttcagccaagattcctgtctttagtactggaatatttgaattagagaaattaagaaagtgaaaaaggctaaagttcttgattcttaccttttatccttatagttaatgacttataaatatatttctttgggaaaataaagaatatcaattgactgtcacctcagttaatccctccagcctctgcgttttttcctctaggtgacctgtaagggcctgctcaataaagccagtgtgatgatgttagctttgttgcatcttttagttttcttctttactcatcccacacttcccatacatatcccgcttcccttccctggtgtgtttaaaggtaaaagaagtaaagaagtgggagaagagacagtgtgaaggaggtgcagaggcagacatgaaaaagtgtcaggaagaagtctgagtgtagcccttaaaagactattgctttctctagccactaccctattctgctttgttcctgttgcccctactttaatatttctaaaaggagtttaaaataaaaatgaaatccatttgaatttcagtcttgaacactcaaataaaagtgcttttctgaaaatctacaatgatgtttttaaaacaccttccttgatcactctgctgcattttatgcaaagatgagcatttccttctgaaaaaaggaaaagacttattgactaacttttgccacatgaaactgtataatcaacctcatttgaaagtgcacatttcatttgatggcatttgcaaattgttccttccccccaccaccagaacttgcaatgtgaaaatgcttccatatgctaaaagctagtctactaattttactgaaggagaagaaaagaaagtatggctagccattttctaaacatgaagctacagtgtgggcagatttggcaatgggagcccctcagagttcactgtaaacaactctgcaacccccaggcctcactactgttcaagatgagtgtagaaagttgtttttgccccacaaaagtaaatttttaaaaatgcaattgtaatgtgtatatagttttaaaatatctaaatgcagttaaaatatagtattaaactctgatttctaatagatttgaacattttaagtgaagaaatacttttgctttcagattctttgtgtatctcaagacattttaatagttttcaagacatttaaactgagtcttcactctgggtggtgggcccccaacccctaatgcgtggcttatagcaatagttttctccctgattttcctaatattagtcattctcccttttaacactgcgctacttggtgctactaggataatctttcataaataacattatgccttttcctgttgactgatctcatttaccctaatctcaccaatatttctcccaaatctgatttataattttctttaaggagtcttcgtagtaatcccatctggccccatttttcaacagtacttttgaaccaagcttctactattattattttcatgttgatttattaaagttttttaaaaaattgtattatgtctgttctttttttcccaagtagatatcagtgtgatggaaacactatcttctatatcttttgactggagtcttttatacttctgagtacatgatagatgttaaatatatactctgttaatacatattagcaagtttaaaatggtggctgtttgtttaagtcacataaattatcaaacaaaagagctgagtgatggtacctgcacaatgcttaatatatagtagagatgataaaataaattctactgaagtctgtacttcatctttttaaaaggtttattgcttagcttttagaattaatggttttatctttgaaatagagaaacaggtctagggttcatgcagttataaataaaaattccttaattttatttctattactgtagcatcttatgccaaaaaaaaaatatcgtaaagaggaagaagtggccaggcatggtggctcatgcctgtgataacagcactttgggaggccgaggcaggtggatcacctgagatcagaagtttgagatcagccttacccacatggcaaatccctgtctctactaaaagtacaaaaattagctgggcgtgctggcgggcgcctgtaatcccagttatgggaaggctgaggcaggagaatctcttggacccaggaggcagaagttgcagtgagccaagatcgcgccattgccctccagctgggcaacaagaacgaaactccgtcttaaaaaacaaaaaaaagtggaaaaaattagaggactaacattacctgattttaagacttataaagctagagcaatcaaggcagggtattggcataaagatagagaaacagatcagtgggaaagaatggagagtccagaaacagattcttatgtacatgggcaactaagttttcacaaaggtataaaggcaattcacgggtgaagggccaaactttttaacagatggtgctaaaacaattggatattcatgtgaaaaaattatttatatcacataccatataaaaactaactcaaaacagatcatagactaaaatgtaaaaactaaaactataaaactccttaaagaatacatagggagaaagtctttgttatcttgagataggaaaagatttcttctatatgcctccgaaagcacaacccataaaagaacaaattgataagttgaacatcatcaaaatttaaaatttctgctcttgaaaagagaatgagaaggcaagccacagatttgtggagatgatatttgcaaaacatattatgataaaggacttatattcaaaatatataaggaactctcaaaattcaataaaaaatcaaacaacccaacaacaacaaaaggtagacatcggatagagtatggtggattacatctgtaatcccagcactttgggaagccgaggtgagaggattgcctgagcccagaagttcgagaccataagcacatgaaaagcccaatgtcattaattgttagggaaatgaaaagtgtactgcaataccacatcaaatattacttccttttctataaatatgtacaattattatgtgtcaactaaaaataaaagaaaaaaataaaattaagaagactaaccatatgaaatgttggtgaatatgtggaggagctaagtcttataccctgcgggtgggaatgtaaaatggtataaccactttaaaaaatagtttggcagtttcttaaaatgttaaccatatacccaccgtactcttcagccatgtcagttagctttttacccaaaataattgaaagcatatgtccatgcaagggcttgtacataaatgtcatagcagccttatttataatagccaaaaatgaagtcacccgcatgtccatcaacaagtgaatggataaacaaactatagtatatccatataatggaatactatttacaataaaaatgaattaattattggtacatgtaacaacatggatggcacttaaaataatcatgctgagagaaataagtcagtcaaaaaagactgcgtgctgtttgatttcacttgtataatattctaaaaaatgaaaaataattcatactgatagcagatgggtggttacctagagatggggaatagaggaggagaaaggaattacaaagaggcacaaggaaacttcaggaggttaaagaagttttaactatcttaactgtgatgatagttttgcaggtatatacataattcaaaggttatccaattgtacactttatttatttatttatttttgagacagagtctcgcattgtcactcaggctataatgcagtggcgcagtctaggctcactgcagcctctgcctcccaggttcaagcaattctcctgcctcagcctcccaagtagctgggattacaggcacacaccaccatgcctggctgttttgtatttttagtagagacggggtttcaccatgttggccagactggtcttgaactcctgacctcaggtgattcacctgccttggcctcccaaagtgctgcgattacaggcataagccaccatgtctggccccaattgtacactttaaatatgtgcagctttttatagcttagcaaaattatacttcaatttaaaaaaagaaaaaattgtaaagaggtgttaaacatgcagttcaccattgaaagcaatattatttaacatatgcactagcatattataagtataataaatgtaaatataatttatgtatttataaacataaatataacaatgaacatatacattattgaagagtcccatatgtcaccttccatcttgggttttatagttactaaaatgttatcaaaggagaagaccatttcataaaggaaattattacaccttgaccatccaatacttcagtctttcattttgcgtggaagttctgtatcagctaccatagtcattttttaaaaataacagcaatcttcgttttttgaaaaactatcataggccatctcaatctttatctatcaatattttccttctttcactttcttgataaagccccatattttgcttctgcttctatgtttttttttaaaaccaaatgattactaaacagggagtgaaggtccaggtgtggtggcttatgcctttaatcccaggattaatctttgggaggctgaggcaggaagatcacttgagcccaggaatttgagaccagcccaggcaacatagtgagacacgaatatctacaaaaatttaaaaaattagccaggcatggtggcacgagcctgtagtctcagcactttggaggcacaggtgagaattgcttgagcccaggagtttgaggctgcagtgagctattaccacatcattgcactctagcctgggtgacggagggagaaagaccctgtctcttaatctgtagaaactgtctaatactattactactgtattagttaaatgactcatttacagcataatttgggaaaggaaattcttggattttatcccaagtgaggacttagaaccaagtgatatagtggttaaaataagagtctcagccaactagagggttagaattttcttggtatttaatgtattgtgcttaatttatcattatgtaagtaagctcaaatctcattggtctctttatataaaaaggaaaaaaaggaaaaagagcagaaaagataaagccccatattttgctgcttctgttttgctgctattgacataagaaggcctatgtagtcctatgtaggcctttttatgtcaatatcagtctgagtaaaagcaaataatgaatttatgctgaggtacaaatataccatttggacagttttatattaacatctgacaatgtacaaaagttatacaaatttgttagcattttctcactgcaaaatattatcaaattaggaaatagcagacactagggatggtttttactatatataatgatgtttaagaggtacttaaacttgatttaaaagctctgcagtgatttacctaagatgagcctgaagagctaatagtctagtttttgttttttaatttttatttgtagcaacaagcacattaaccatttgattttttttatattttgggagaaagttgtgaccatgtggcagtttggatttgaaataataatggcaaataagtggcctgtgctgaaaattgttaggcatatctctttatggaaaactactttggtgatataaaaccaccgaggtctatagttatataatttaggcaagcagaaaaatcagacagggctggttttttttttttctttctttcttttttttcttgacagtgtctccctctgttgccaggctggattgcagtggcgcgatcttggctcactgcaacctctgcctcccaggttcaagtgattctcctgcctcagcctcccgagtagctgggacaacaggggcgtgccaccacacccagctaatatttgtattgttagtagagacagggtttcaccatcttggccaggctggtctcgatctcttgacctcgtgatctgcctgcctctgcctcccaaagtgctgggattacaggtgtgagccaccatgcctggccagggctgggtttttattaaagatttagtttcgttcttagaagttatgtcaatttctgatgagtaatctagtaataacttaatctgtctttctgaattaattctgcaaaacactgccacatactgattgttgtaaacattgttggtttcaagacactttcttattttaaccctcctaacctttcaaagattcctcattacttatggtttaagtcattccttcttgttttttatattcaagacctttcacagttgatcactgagctgtcctttaatcctctgtgtcactgcttttcagtatgaattgctaaagtttctatgatttttctgtttctttgccttttgtcaatctttgttcagtctggactctctgcctttctctcatctctacctactcttctaagccctagaatgcttcaggtaccacataaaccacatcagcataaaaccttccatgacattctattcatacatgttgtaaatgcctcttttgtgccgagctgtcagtggtcaccaaggtaaggacaggagcaaaggatgctccgtggtactccactctgatggacgaggaaaaatgataaatttacaaatattttatctcatcctatatacattttactttttatttatgtcttataatgtaagcaataaattggtacccaaatagaaagtgtaaaataattaaaatacatatgttgagggagtgcatgcccaaaatgttttactgatggggtatagaacaaaaagttaagaaaccaccgatctaattgtcaggtctgtttccgcatttgtaaagttaggtcaaggattggactagataatttccaaggtcttttttaagcttaaatgttcatggagttaaaaaaattattttgaaatctttaagtatacagaagagttgccagtgtagtacagtcagctcccataagccattcatgtggttttatccactgttaacattttgccatatctcctccttgtcttctaatacatatatatacatattactatacttttgttctggaccatttgctagtaaattgcagaggttgcaaccctttaagctatgtagtttagtatgtgtcccttaagaacaaagacattccattataagatgttatgtaagagactcagcacaaaagaggcatatgtaacatgtaggaagagaataacagtaattgatcaagttcaatataccataatctaacatagagtccacattcaaattttgcctattgtccctttatgacctttatagcagttttttcactaatctaaggattgagggaataggaattttcttgccatgtctatttagtttcctttaatacagcagctttttagcttttccttgacttttgtgacacggacagctttgaaaagtaaaggcccaaccagaaacagtggctcatgcttgtagtcctagcactttgggaaaccaaggcggggtagatcgcttgcgttccagaccagcctgtgcaacatgatgaaaccacatctctacaaaaaaaaaaaaaattcaaaaattagcttggtgtggtggtgcgtccctgtagtcccagctacttgggaggctgaggcggcaggatggctggagctcaggaggcggaggttgtggtgagctgaggtcgtgccactgcactccagcctgggcagtagagccagaacttgtcttaaataaataaataataagaaagaaataaagaaaagtaaaggcccttaattttgtataatggctcatttgggtttgcataagtgtttccactgtaccttgatttgtgtgtgtgtgtgtgtgtgtagtttaattctgtgtgtgtatgtgcatttgggtgcacacaatgtgcacgtacgtgctatggtgctgtgtgcgcaagttgagtcctcttttccaaaatagattgtaaattccttatagacagagatgatttatcttggtaatttttattccccacacttctatgcacgtatgatacttagcctatgattcaaattaaaaatattcataagtcaaaagttcttacatatcccatgggttaaggagatgatttaaaacatacagggaagaacatatcagattaattaactctcagtgattaaggatgccagagaataccatggtaacaatagaagcattatgttttattttattgaatcttgaaggaaattggatactccaaagtataatataatatggaacatgcactgtgaatactgtactagttgacatgtgtaatttcttttcatcatttctctgtggaaaccctttgcaataacgtttgaccttttttccatatacagagtcccaaaatagtattttcatctgacatgtgtattttaatgggtagttagcacgaaagatctttgtcttttaaaaatatgtttctcaagattgggaatatcttcagttgtcagtaaaagatctcttattatccttttattatcaaataagcatagttgtaagacagtgactcatccaaagatttgttgtggctgcttctatctatggtttttttgtgagatggagtttcgctctgttgctcaggctggagttcagtggcgtgatctcgactcactacaacctctgcttcccaggttcaagtgattctcatgactcggcctcctgagtagctgtgactacaggcacacaccaccatgcccagctaatttttgtatttttagtagagatgggattttaccatgttggccaggctggtctcaaactcctgacctcgggtgatccacccaccttggcctcccagtgtgctgggtttacaggtgtgagccaccacgcctggcccccttcagtctattttttatttttgtgggtacatagtcagtgtatatatttatggggtacatggtatgttttgatacaggcatacagtgtgtaataatcacgtcatggagaatggggtatctatcccctcaagcatttatcctttgtattacaaacaatacaattacaatcttagttattttgaaatgtacaattaagttattattgagtatcgttaccctattttgctatcaagtagtaggtcttattcatttctaattattattatttttgtacccattaaccatttccacctcccgctaagtccccactacccttcccagcctctggtaaccaccattctactctctatgtccatgagttcaattgttttgattttaatggttagtacaagtaagaagtttttcattttaaagtcagcatctgaaaagatacattgtagcctttagaggctctgatttccttgaagcctgttacttatttgtaaaggtccatagtaagattgaacttactatttggaattttaaattggtagcttcaagaactcttagaagatctttttttttcctattttaatgaagaacatttaatatacaggttttcttagtattgactttcataagtattttctggggcaattactatctcagttgattatctctgaaggcctattttaactctacatttatctgaacttaactgaataactcctcattactcagcacatattttagtgaagagattcttaggagtaacggctgacattcaccatattgtggtttgtctgtgtgtatgttcctgtggataacttggcaatcgcttcctcagcgaaataacagccagtgtggttcagccaaagtttagaggaataaagtaactgaagtgggaggtttttctgtaatgccgagtgattttattcttggttctttctttttgaattgctcaggtagtgtttgccgtggtaggtattaaaaccaaaccaagcaaacaaacaaacagtaaaaacccaataacaaccaacaaacaggaaataccaggtaattcagattatctagttatgtgccatagtatgaacccaagaactcttcctgtaactccaaaataaatgtatgcttaggtcagaatctgagttagaaatgaaaaacaaggctaggtgcggtcgttcacgcctgtaatcccagcactttcggaggtcaaggcgagcggatcatgaggtcaggagttcgagaccagcctggccaacatagtgaaagcctgtctctactaaaaatacaaaaattagccgggtgtggtggcaggcgcctgtcatcccagctacttgggaggctgaggcaggagaattgcttgaacatggtaagcggaagttgcaatgagccaagattgcaccactgcactgcagcctaggcaacagaacaacactccatctcaaaaaataaagaaataaagaaataaataaataataataaaaaagaaatgaaaaacaacatcttgtctattttttccaggatcaggtgtaataggaaactggtgatgcactaagtttttcacagacatggcttgagaatattttctattttatatgcttgttaattttttaaaaataggattgtttgggagcttatttccactgcagcaggaagaggcactgtgattcactgaattgtgtgaattaaaggcatgatcaaggaacaggccattgaaaatgatggccctgcagtattaaaagtgctttgatcttctgttttgacacattgaatttatctttaattatatgtgatgacatttgattactatacacttagactattataatgtggtttgtaaaatatagtttgtaatgtataataacttcaacaccgatttttctgtagatatgaatttacagagtcatgttttagttttgtttaagagaaaactattagacttctgaattaacagacatttaaaaggtaaatatttagtagtcaggcaaagtatgattcctatacaataagtattaggactgtaccctgtgggactcagtgccttattttaatagaggtaatagaattctatgtggtggtttcctgatctatccactactggctgctttactacaggtaaatcacttagttctctgagcctttgaaaaatgaaagccttagactacatgatattcaagattttaattctgaaattctttgaatctattattctgtgacgtctttgatggacataatatagaattccatagaaattactgacacattttctaaaagaaagatatttttaaaatattgtgtgaattaatgggttttgaccttgcatttaaatatgaaaatgaggccgggcgcagtggctcatgcctgtaatcccagcactttgggaggccaaggcaggtggatcacctgaggtcgggagttcaagaccagctgaccaacatggagaaaccccatctctactaaaaatacaaaaaaattagctgggcgtggtggcacatgccagtaatcccagctactcaggaggctgaggcaggagaatcacttgaacctgggaggtggttgtggtgacccaagatcatgccattgcactccaggctgggcaacaagagcgaaactctgtctcaaaaaaaaaaaaaaaaaaaaaagaaagaaagaaaaaagaaaaactttaaaaatgcacttatgggacagtgggttggggggcaaccccccacaggccacaactgtagagagaactttcattcggaatttcctttattatgccagtaccttagccttgagggtgtgagtctttctttgaaattgtctgctttgcttgcatttacatgctcaaccctggatttttcccaatttaggcagttttattccccagcaatgagagtccttaagagtttgaacctgatcctaattctctaggggaaattacaaattattctttcttttcaaatggtagccatatacagtgattttacttttaacatcttttttttttttttttttttttgaggcagagtctcgttctgtcaccaggctggagtgcagtggcgcaatctcggctcactgcaacctctacctcctgtgttcaagctattctcctgcctcagcctcccaagtagctgggactacaggtgcacgccaccatgaccagctaattgtggtatttttagtagagatggggtttcaccatgttggccaggatggtcttgatctcttgacctcataatcctcccgcctcacctctgaaagtgctgggattacaggcgtaagccaccacgcctggccattaacatcatttaatcaattttgtcaatgtccctaatgggatagtcaggcaaaaacaaaccaacaaaattctgtaagaaaagtggctaattatacattatcattaggaagcataatatttcatgtgtttttatcctgaactttgtttctttttgccatacaacccgttccttactttgtagggaggacttttattgtaaaaaaaagatctgcctcacacaattattggttatgactatttatcacctaagaactaaacagtggtgctttgatttgagtttgtttactcgagaggcagagtatgttttatctgtaagtactttgggatttcttttgaactaaaaatatacaaatacaattattggttatgactatttattgcctaagaactaaacagtggggctttgatttgagtttgtttactaaagaggcatagtatgttttatctgtaagtactttgggattttttttaactaaaaatatacaaatatgtatagtttgtggtaagtaggtgacagcgtgaaaagcaaaactggaaagctatgatcctacagctacatatcaagctaccctttttttctcaaagactattgctgtgttaagattttattatagcatttgtttctttttagagagggtagaagggtgaagccttactcgaaaccatttcagagtagttaactccagactatatactaatggagaagaagagtaatacagataagttaaaacattagataatgattgctctttattgctttaaaaaaacatggggaagagcagttgggaataggacccaggcacttaaatctgggaaactcatttttggtctttttttcccactgctgcagtagcctgggcaggatccctagagacacagccttcaggcaggaagatggaggagagaaagcagatcacagaccctaaacatctgtaggttctctctctttcttgttccctacagctggtgaatctgaattgaatccttagtaaagtttcatattaggtgatttagtagatgctagttaaggaaaaatgatgatctctaagaattagcctgattttattaaaaaaactttgtggagattaacctaatttccttcttcttaggaaggctattagactgttgatcacagcagacaggggtctgaatttcatgaagttttttgacatggtccatcatgatatcactgtgggcagaatggatgagagggatatgatataaaaatacggttatgttgttatgcagctggctgaacagccatctgaaagagtgatatttaatggtctgtgttaacctggaaggagaactctgggataccataggaatctgtcttcaccttcattatatatatcaacaaagagttaaaagaaatatagctggcctactaattaaatttgtagataatatacagttgaggaaggatggcttaaattattgggtgatatagacaggagtcaaaattattgggtgatatagacagtctcaataaacataggagtgcagatatctctttgatatagacaggagtcaaaaaagctctaaaaatatcaggatgataggcttaaccagcaagataaaatttactgagaacaagtttataatataatatataatgctatgtattacagaatagaggagaaatggcttagatgtaggggtaggaaaaaaggcttaacgttcctaagttaacagaaaacttaatatgggcaactttgtcatgtttctttcaaaaaaatgcattgtgatcttaggaatgtctagaacattaatagaatgtctagaataagattagtagtagtcccgctttattctatgcatcggactattttgttctgattatcgcagtctgagagtgataagcttcaagcacatccagaagaaaatggctaaagtttttcacataacaaagctacaaaaagaagcctataaggagtcataatagctgtctcctgatatttgatgggcaaccctttggaaggaaggttagaatgagactgtgaagctccagaaggtaaagtgacaaccaattgttacatgaagatggattttgactccatataaagaatatttgtctggtccttaaagctgtctaaaaaatgaaatagactgtgctgggagttaagtagtgaattttccagggtgttgccaaactaccttaagggtatgtggtaatagaagaaatttattcatcagaaagggggtaaaactagttgatgtttagattcagtctactctttttggtggtgtgtttcctacttgtttataccaatttactctctgtcgtttggctaagaggcagagaatgtctttgaccataaattgataaacaggattcatctgtatatgttattatcaaaacatgcctgttacttttccaagaagctttattcttatctactcctaaaatatctttatgaagttaaaaggacttaacataagtatttagaaggaaaaatgttttttttttctaggaagcattatttatatttggcacttttttattagtgtcaaaaacaaggtgatcacactgcagctataagaagatagtgctatgaaatgaatatgtgcagatacatcagagtaaccaggttcattggtttgttcactcatttgttttttactcattcattaatttataaatattttttcggatacctggtaagtgctggtcgctctgctaggtactaggaagttgatatatactatagtttctctgaccatttacctaaaaatctgttaataggctccatttcttctaatcatccaagaaacatttttttaatttttaatttttgttggtacatagtagttctgtatatttatagagtacatgagatattttgatacagatacacaatgtgtaataatcacatcagggtaatcatgcttgagggtatggataccccatcttttagttattttaaaatgtacaaaaaattattgtaaactatactcaccctgttgtgctatttagccctatattttattaattctatctaattatatttttgtagccactaactatcccaccctccctccatcccgctacactccccagcctctggtcaccatcattctactctctatttccatgagttcaattattttaatttttagctcccacaaacaactgataacatgcgaagtttgtatttctgcgtctggcttacttcacttaacataatgaccaccagttccatttatgttgtcacaaatgacaggatctcattcttttttatggctgaatattactccgttttgtgtatataccacattttctttgtccattcatgtgttgatggacacttagggtgcttccaaatctcggctgttgtgactaggtctccaataaatatgggagtgcagatatctctttgatttactgatgtcctttttgtggatgtatacctagcagtgggattgccagatcatattgtaactctatttttagtggttttaggaccctccaaactgttctccatagtggtggtaataatttacattctgtcaacagtgtatgagggttctctagtaaacaattattactttgttttttgtgatgtaacctctaaagacaagtataaaagaaacactggaaaatactgatttttaacgctgtatgctagctattctaacaactatatgttaataacttaatatataactgttagtatatataataacagctgtattataactattaggtatccataaaaatatcatgcctttatgtactttaatattaatattgctttgaaactgaatgctgaggtagaatttgttttttcaggtttctgtttactgttaagagttttctatattttcttccttttccttttttggactgttgttaatttccatattgctttttgaaaggagaaataagatattgttaaggggcccaaaaatatacactaaccactgtttttttcaagaaaaaaaagccatttttttctcttagataaatattttttagctggttttaattttaatgtgcatcattgctaggtaggcaagaatgatcttgaaaaagaaagcttttgtaatattaagccaacaaagacattgcctgcaggataaatgaatagttgaacatattcactggttacatggtcaagttttatctttaacttattttaatataagatggttactatgtttcatattaagagtgtacccttttaacagtaccttataaataattcttaagcccaggtagggtgagttagaagtatctagttttacaattagaaatatgaaatgagaaatcagtgctcctttgtatgactaagctcaagcaggatttaaggcagggaggggtcaccactgattgatcttcaaatcttaccatgtctaagactgttgctgctgccatttgtctttctctggttttctaggattctttggcaaaatgttagctccttttcatcaatcttcccatctgcaactgatgattttctctagcatttcccataatcatctcaagattgcagagaaatagaagagatatttctacactcatgtttatagcagtgttagacacaataaccaaaaggtggaagcaacccaaatgtcatcagtagatgaatgaataaacaaaatgtggtgtataaatataattgaatattcagcttttaaaaggaaaaacattctgacacatatacaacacgatgaccttgaggatgttatgctaagtgaaataagccagtcacaaaaagactaataatgtatgattccatttatatgtggtacctagactgcttagcagattaagggatcttcaggatttggagtataagacacactcggccgggcatggttgctcacacctgtaatcccagcactttgggaggctgaggtgggcagatcataaggtcaagagatcgagaccatcttggccaacatggtgaagccccatctctattaaaaatataaaaattagctgggcgtggttggcacgcacctgtagtcccagctactcgggaggctgagacaggagaattgcttgaacctgggaggcagaggttgcagtgagccgagatcacgccactactccagtctggcaacagagcgagactccatctcaaaaacaacaacaacaacaacaacaacaacaacaaaaagaacacactcacaataggatataactaagtcatctactccacatgtccaaaactgggaacttaggatctttttctcacacatttatccttgctccttccatcccaagttagaaatatggatgtcaacccatactgcttttttcccccctctgaatactattggagaccaagccctgctgattttatattctttttttttttttttcttttgagacggagtctctctctgtcacccaggctggatggagtgcagtggcgcaatctcagctcactgcaagctccgcctcctgggttcatgccattctcctgcctcagccttccgagtagctgggactacaggcgcccgccaccacgcctggctaattttttgtatttttagtagagacgaggtttcaccgtgttaaccaggatggactcgatctcctgacctcgtgatccgcccgccttggcctcccaatgtgctgggattacaggcatgagccaccgcgcccggcctatattcttcatttttaaaaaatctgccttctctacattactggtacaatttattcattcaaggagtacttaattatatagtattccagatggtgtcagttctgtgaaaaaagaaaaagtagggtgggatgggagtttgggagtgtgggaggtggggagagagttgcaattttaaaaatggtggtaatggtggtccaggcttggtgcagtggttcatgcctgtaatcccagcactttgggaggccgaggtgggaggatcgcttgagcccaggagctcaagtccagcctggggaacaaagtgagacccggcctctacacaaaattaaaaaattagctgggtgtaatggtgtgcccctttggtcccagctacgtgggagcccgaggcaggaagattatttgagaccaggaggtcgaggctgcagtgagccaagatcatgacactgcactccagcctgtgttgacagagtgagattctttctcaaaaaataacaacaataataaataaataaataaataaataaataaataaataaataaaagatgttccataacggtgaaatctcagcaaaacctgaaggaagtaagccatgagaatatttggaaaaaaggcttgccagatagagagaacagtcagtgcaaaggctgcaagatgagagcatgcttggtgagttcaaggaactccaaggaagccaatagatctgaagtggagagagcaggaggaagagccatgggaaatgaggtcttagaggtaacaatggtctgcttatgtaggggttttgtgaggcactgaatggatggatgcattgggcagagaagagacacctaatttatatttttaagagatcactggctgctggttgatactaggttgtatgagcaagggatgaattagacaagctaggaggttgttggaatatttcaatcaagagaaggtagcttagacagagtggtcagtgacagtggaggcagtgagctgtggattctagaatttggaagatagagccagcatgagtttctaatagattagatgtaggatataagagaaagagttaagataaatctacgtttgtttgtttgttttttcctgtgtaagtgcattttacatcaacttagatgggaaggaaggctgtgggtagaacaggtttagaggggaagaacaggacttgttaactttgagatgtatgttaggtatctaagtggagttattgagtaggaagtcagatatatgagttcagaatttcattggaagttaatttgggagttgtatgaaaatacatagtatttgaaacaaaaaactagatacaatccccaagagaatgaatagacagagaaaaggaacaagaacttagcccagggcatttcaacattaagaaatatggattcaggcaaagtaggggaaaagagggaaccaacaaaggagactgagaagaagcaaccaatgagataagggatgaaatcaagagtatagtattctggaagccaagtgaatgaagagtatcaaggaggagagagtgatgcattattgccttagtttaggtcttagtcacagtcacgtcctaaattatgacagtttactttggtctttcggcctctagctgcctccaaccccttctctatacctcatctttttcctattgtctgtgatcaaaatgttctttaaaatgaacacagatggttttctttctatttatgctgtttgtcatttgttgagatgcttttacctgttttttgatattttgtcaaatatggtaaatttttggccattaatttttcacgtactgtcctgccctctcagcctacccatggtactgtatttacatgtaagttcaaccagttaatactgttccacagatcagcgaatctttgctaattttatttgtcttttttctttctgtgcctcagtgtggatattattgtgtgcttcaagttcattatctttctcgtgccaaatctgctattaatcccattattaatagtaatatggaaattgtgaatgtgatgctgatgaatgcagaactctattgtctttctgtaaagaatgttgagctttcttctaggaagtagtttgagtgaattgtggatcagtacaacccttttgacacttgttagagtttgtccagagttgtttttactctagggcagtggctctcaaagtgtggtacctggaccaacagtatcaatgtcaccttggagtgatgcttagcaatctgtgttttaatacatctctaagttattgtgatgtactcttaacttttaaccttttacccctttagaaaatataagtgcagcttactgccagtgcttttttaacgttacataaacatgggtctttgaggctgaagcaaatctgactgattttcaatgtggaaataaaatataaaaactgttcttagagttatttttaaactgaactaacatcagaatcacctgaatcatcagaatcgtctatttcggaaaaattagattcagccaataactgtttgagaactgtgttaacatcatgtgtaggaatgctatgttttctaggatttgacatttttggtgattgagaattactacattttgtaaatggatatatcactaccaaaaacagaatggtacaaatagaatgatgtattttgtttccaaagttgatatactagagcaatgtgaaagtaataattaaaatgagatattacatggcaaagttatctcagggtaaacgctgcagccgcaagtgccactggtgagtattctctgggcagatgggaaaaggatcaagaaccactactctggagctagttcagccttactactaggatgtaacccttctggagtctctgtgcagtgctctagatattcaatgaggtctctctcctttaccttgtcaaaatgtctcacagtcttatatgagtactgggaattatttagattaacattcatggtactttgtttgttcttatggaatttactctatgtatgtgcagcttaattttcagtcatagtctcaaggggaaccctgtgtagatttcctgagctcttctctgcatagctcttcctctttagcactctgccctgaagagtccatctctttcctcctctttaaactctgaactctgtcaccctaacttagtaagacctctgtactctgcttggggttatcattccttgtggtgcattccagaaagtgcttccagacagacatcagggcgaccttgttcattttccttttctcagggatcacagtcttaacactaacttttgtctgaggtgtgacagtaacttttttgtatatttttccagttttttcagtgtttacagtaggacagatctggtactagttattctgttatagctggaagtccaggtacttattttttatggtcatgaggctacatagaagctcattatatgaggaaaataaatgctgtactaatttcttcacatgatttcaggcagcactagagtgctatatgatacatattaggcactgtgctagcataggaggattaaaacccaaatgggatagtgcctttgtcttcaaagatctcatgacctacaagagtggactggtatataaacaacacattccaagtcagtttgtgataaaggcagcatgaaattatataaaggccatagactttgaaatcagataggctttggttaaatcccaactccatgacttactattgtattatgcaacctctcacatctttagttttccaactgcagaatggagataatagtacgttataggacttctgagaaggttaaattaaaattcttttataaagcacttgacttggcatatcatagaggttcattaagtattaggtttatttcccgttagaatacacataggatagaggagcagttaatttttattattactatagaaatcttcagggaggaaatgatatttaaattgtgccttgaaggtggagtagggttttgatatgtgttagatgggttccaaggacattctacttttaaggaactaaatgagcaagggctcaaaggtgtaaaacgtggggaaggctgtaaatacacttatgaatgtcagcatagtccagaaccttaggaaaagcaatttaggtcttaaaaacaaacaaacaaacaaaaagacaacaaaaaactagtagtaggaatgtaaaaatgaagaaaaaaagaacaaacagaaagtctaaccccatagtaaaagtatacttccttaggccattcctatttattgccatgactaataaatttgggaatgcctgtggaaaattcctgtgggctgatcttttcttaaccactattcaagactgctttacgttgatagtctaagccgatcatttcattaatattaaactccagagctcattcccgagtttccaagaatttgctgaattgcttttctctgttatctgcttctttgggtaacttccatatttttctttcttgccctgtaaaaattgatttcctaggttttccaagtgattgataatgtgacagtactataaagacttttcttagactctggtatgttcgcatttagtacaaatactgtcaagggttttataaagtgtataactaatatactttctacatatcttttactagggaattctaaacttaagtattttatttcattgaggttaaaatatgtcctgttaagattttttttctcttttaaattattagtgttttgcattgttaaaaatcagctggcttcttggattgagtttacttcacttttccagtgggtaacttttatctgacctttaggtctgtaattgtttggtttgttttctgaagctatggaatgttttggaaaaaataagcctcatggagaagggctattatccctgaaaatgatgagaccggaaatgagaaaagcaaaaatcagatatcacccttgaccatgtggatttcagtttttaaaaagtctttatcctctgtctctgagaaccattatttggaagtctgtttctctgcctctctgtgataagttctcaccaaagatcctcttgtgtttttattagaattacatcgaattcataaattggggagaatttatgtatttataatattgaatcttttcatttatgaaaatggtttatttctctatttaggtattctataatattatagacttttgtcctcaaagatcttacaaatcataatttggttagatttattcatgggtttttaatagtttttaaaaaatgggatctgtttttattatgtaatccaatcagttcttggatcagaaaattgatttttatatttaaagtccagcaaaactgctttgcatgcttattaaaatggcttgcaaactatcgtatattttctatggaatcatatatgcagtagcagtttttcttctattccaaacctcatacttctttattcttgaatagaagtgtcatagtgggattttttcttattcctgatttccggagactccaatatatcatttttcattttagaaagtttatttttcttgctatattggtggaagcttttttcttaagtgatgaatcaatgtaaaattttatacttttttattttggaaatttctagtttattagggtcctcttttaatggacaaggcagtagagactcaaaaaggtaatggagtttatttatttatttatttatttgattttcaacttttaagctcaggggtgcatgtgcaggatgtgcaggtttgttgcataggcaaatgtatgccatggtggtttgctgcatagatcatctcattacctaggtattaagcccagcatctgttagctattcttcctgatgctctccctcttcccatcccccaccatccaaggccccactatgtattgttcccctccatgtgtccctgtgttctcatcatccagctcctacttacaagcgagaacatgtggcgtttggttttctgttcctacattagtttgccgaggataatggcctccagttccatccgtgtccctgcaaaggacatggtctcaatttttttatggctgcatagtattccatggtgtatacgtaccacattttcttaatccagtctatcactgatggacatttaggttgattccatgtctttgctattgtgtatagtggtgcagtgatcatatgtatgtatgtatctttataacagaatgatttatattcctttgggtatataagcagtaatgggattgctgggtcaaatggtatttctgcctctaggtctttgaggaatcgccatactgtgttctacaatggctgaactaatttacactcccaccaacagtgtaaaagtgttcctttttctctgcaaccttgccagcatctgttgttttttgactttttaataatagtcattctgactgatgtgagccattgtggttttgatttgcatttctccaatgatcaatgatgtggagctttttgttatatatttgttagctgcatgtatatcttcttttgagaagtgtctgttcatgtcctttgcctactttttaatgtttttttttccttgtaaatttgtttaagttccttgtagatgctggatgttagacctttgtcagacagatatattgcaaaaattttctgccattctgttagaaactataatcagcttgatgatagtttcttttgctgtgcagaagctcttcaattagatctcatttgtcaagttttgcttttgttgcaattgcttttggcatcttcatcatgaaatctttgcctgtgcctatctgctgaatggtattgccaagattttcttcttgggtttttatagtcagggttttacatttaagtctttaattaatctcgagttgatttttgtatatggtgtaaggaaggagtccagtttcaattttctgcatgtggctagccagttctcccagcaccacctattaaatagggactccttttcccattgcttgtttttgtcagatttcttgaagatcagatggttataggtgtgtggtcttattcctgggttctctattctgttccattggtctatatgtctgttcttgtaccagtaccatgctgttttagttactgttgccttataatatagtttgaagtcaggtagtgtgatgtctctagctttgttctttttgcttaggattgtcttgggtattcaggctcttttttggttccatatgaatttttaaatagtgttttctaattctgtgaaggatgtcaatggtagtttaacgggaacagcattgaatctgtaaattgctttggacagtatggtcatttacatgatattgattcttcctatccatgagcatgggatatgtttccatttgtttgtgtcatctgtgatttctttgagcagtgctttatagttctccttgaagaggtccttcacttcccttgttagcctgggtattttattttctttgtagcaattgtgaatgggagttcattcatgatttggctcttggattgcctgtttgtgtataggaatactagcaatttttgcacattgatttttatatcctgagactttgctgaagttgcttatcagcgtaagaagcttttgggttgagaggatggtgttttctaggtataggatcatgccatttgcaaacaaagatagtttgacttcctctcttcctattcgaatatcctttatttctttctcttgcctgtttccctggccagaacttccagtactacattgaataggaaaggtgagagagggcatccttgtcttgtggcagttttcaaggggaatgcttccagcttttgcccattcagtatgatattggctgtgggtttgtcatacatggcttttattattttgaggtatgtttcttcaatacctagtttattgagagtttaaacatgaaaggatgttgaattttattgaaggccttttctgcatctgttgagataatcgtggtttttttctagttctatttatgtgatgaattacatttattgatttgcatatgttgaaccaactttgcatcccacggatgaagcctacttgattgtggtggataaactttttgatgtgctgctggattgagtttgccagtaaaattttgtaatttttaatatctactaagataaatcatatggcttttttatcccattaatgtggtagattatgttaatggcttttgtagtgttaaatcatccttgcattgccaaataaactatacttagttatttaaaaagaatatattgctgtaatcccagcactttgggaggccgaggtgggcggatcacaaggtctggagatcaagaccatcctggctgacacggtgaaaccctgtctctactaaaaatacaaaaagaaattagccaggtgtggtggcgggtgcctgtagtcccagctactcgggacgctgaggcaggagaacggcgtgaacccgggaggtggaggttgcagtgagctgagatcgcgccactgcactccagcctgggcaacacagcaagactccgtctcaaaaaaaaaaaaaaaaaaaaaaagaatatattggtggatttttttgttactattttgtttaagaattccttgtagtttttgtttgtagtaccgatttttctttctagattatagaagaagctcagcagctttcttcattttctattctctggaaaaatttttataacataggattttctcatcatgaagatatggtaaaacttatttccacatcctccatacttgatggagtttctaagtaggagggcttttaaaaataatttataaattgaaatataatgtatttatgggaaaattgcacaaatgataaatgtagctgtagctcaatgaattttcacaaactgaacaatctcatgtaaccagaatccagatgaagaaacaaaaaattaccaatgtcccagaagcccccactgtgtgccctttcagccactgccttttctgagggtgaccacctactccagtttctaaactgtgtattttaggggggtttggttcgtttttgaactgtatacagatgaaattatacagaatgctttttttttggtatatggcctttttcactctgtagtgtatttgtgagattcatcatgttgtattgtgtagttgtggttcattctgtttgctgtgcagtatactattttgtgattattcatacaatagaacatattacatatttatgtatccattctaccattctactgtgtgtgtgtgtgtttttttttttttttttttttttttttgagacagtgtctctctctgttgcccaggctggagtgcaatggcagatctcagctcactgcaacctccgcatcccacgttcaaacaattctcctgcctcaggctcctgggcagctgggattacaggtgcatgccaccacgcccagctaatttttgtatttttaattgaggtggggtttcaccatgttagtcaggctgatctcgaactcctgacttcatgatctgcctgcctcgacctcccaaagtgctgggattacaggcgtgagccaccatgcctggcccattctactgataatggagttttgcatgccttctagttttagcctagtgtaaatagggctgctatggacattttggtggacttatttgcacatttctttcaacctaggagttgaattattgggtcatcagttatgcatgtatttagcttagtgatgttgccaaacagttaagttgttgaactaatttatattcttaccagcagtgttggagtactggttgctgcacattcttgttgggcttcgtatttaactactatattttagctactctagtgggtatattgaataacatgtagtatgctgttaacttgcctttctttgatgattaagcacattaaacacttttttcatatacttattggttatttgtataattttggtgaagtgatgtattgcttctcgacatgctataaagaaatacctaatactgggtaatttataaagaaaagaagtttaactggcttatggttccataggctgtacaggaagcataacggcttctggggaggcctcaagaaactttgaatcatggcaaaagacaaaggggaagcaggtgcatcttacatggcaggtggaagagagagaggagggatgtgctctacacttttagcaggaggaagagagagaggaaggaggtgataacacttttaaacaaccaggtgtcgtgagaactctatgaggagaacagcaccaaagtgatggtgctaaaccatttatgaaggatccacctccatgattcaaacaccttccaccaggccccacctccaacattggggattatacttgaacgtaagatttgggtgggacacagatccaaaccataccaagtgcctactcaagtttttgtccatttgagttgtctgcctttttcttaatgacatgcagaagttctttatatattataaataccaattctttgttgattttatgtactacaactagcttctctatgggtatatttttattagttactcagtttttaaatagttatccaaactttctatttccttttgagatctttttaataacatttttccagaaagttgttgatttatcttaatttttaaacctactgataaaaagttgtttaatctatttttggtatcctttcaattattctagaaaattattagttgctatcgctttaaatattgcatatacaagtatatatgaggatgtgtgtgtatttttaatataactggtagcatactttacatactgttttgtaccttattttcttcacttaatatttcttggaaatccttgcatttcattatataaggagtgcatcatttaaaaaatactttcatagtatttaataatattatgtgataatatatttacccaattttttattgataggaatttgaattactgctagtcttttgctgtaccaagcaaagctgaaattaggataaatacataaagtggaatttctggtcttataaactcctgggctgatgatagagtattaacttttatgtttatgttccatttttaatgttttaagtcttttagaaattgagatataaatgacatgcaataaaattcaccattttaaagtgtacagttcagtggtttttactttattcatggagttgtgcgatcactaccagtatataactccagaacattttcatcatcccagaaaaaacccttagtagtcactccagattcctgctttcccccagctcctggcaccctctaatctattagttttctgtcactgtgtattcgtctattctggacctttcatataaatatagctatacaaatgtgatcttttgtgcttggtttcttttacttagtataatgttttcaaggctcatctatattacaacatgtatttatgcttattttcttttatgtatggtcaaataatatttcagtgtatggatataccacattttatttgatggttatttgactcagttttactttttgtctattatcaatagtgctgctatgaatacttgtatctacgttttgtttggacatgtgcttttaattctcttgactctatatctgggagtagaattgctgggttctatagtaatcctatgtttaactatttgaggaactgccgaactgtttttctcagtagctgcaccattagcactgtgtgaggttccaatttcttcacacttttatcaacgctttttattttccttacaaattaaaaaaaaaattatacctgctattctaacgagtatgaagtggtatatcatggttttgattttcattttcctaatgtctaatgatgttgagcagattttcatgtgctgattggatatttacatctcttctttggcaaactgtcttttcagagcctttgcctcttgtttaattgggtaatttgtctttttattgttgagttgtaagagttctttatagagatacttatattatgtgtgttgataaagggcaaatatctccatatgaagtgttcctttatgttaatgagagtaaaaatgctaacttccaaatagaaaaatggccaaataatacaaaaaggaattcacagggaagaaaaacaagtagctaatagtaaaaaaataaagaaaaagcaaattacattactgaaataaatgcaaattggaatgatgacttttttgcgtattatatttttaaaaatatgattttttttgtgggtgagtatggggtgaaactctcaggtaacataggaaatgtaaattgattacctttgtagaggatatttggcaacattataaaattatatagaatatgtctatataatttgaatcagtagttttacttcttggaattttttctgagaaaataatcattattttgcatatagattacatacagtgatactcatgccagtatcatctttaatggcataaatttataatcagcaagaggatggttaattacatatagtacaatattttaccattgttaaaatttatattttaaaatatagacaaattgatcttcatataatgttaatgttaagtgaaaagtagtaagatacaaagctgtgtaaaatgtatgataacaattcataaaaagcaacattcacccacacaaaaacctccaccaccacacacacacagaaataagagtgaaaataaacattccatcatattgacagtgattaccttcgggcggtgtaattaaggttgatatttattttctcctttatgtagttctgaatttcccagatttttaagattaaatatgtattgctctctaactagggaaagaagtaaaataattataaataagatagattaaatggattattatggtgcagtgagaccttttcccattggccctgggattttcttcctttggtttatgagtttaaagtgttgacagttgtgaactagtttgctaagtgataggaagcagtgttgaaatgaaatactttaaatcctgaagatttatgaggaagaaaatacttgggcaaatagtgtcaatgagtcctgatacgtattgctaacttgtcactagttcactttacatctgtgtagtgataactttgttttttcctccctcattgattatagtctctcatcccaccatttgccaaggccgtgtaaatagtttgctgtcgtagagatacgcagcaggcccatttgagtagttctctttcactctgatctccttagaaacctatcacttttacctttaaatgatacatttttaaaaaactattgttgttgttgaatgggatttccctaaataagaagagccatctccctagtttcaggattgtggcttctttaattgtaatggagttttaatattatatctacggtggaaatcagagtcaattcaatcttattttgcatcccctgtatgctatcatactgattaggggtgtaacaaagaatggactgtgatttttgccattttgtggttttcactggagattttatagtacagagggagagaatggcatagtaaataaaagaatgagcttagaagtgagactttgtgggtttaaatacctgctctctaatttatcagtttgtatttaacttctcaatatccttatctgtaaagtagaaataacagcactatcattcatcactttctatttccttatctttttgccttttcttcatggaagttttcacttccaagacattatgtttttcttcatttatttacagtaatgtaaaatcctggaatacatgtacctttttggttcactcatgtatttttagtgtctagtgtagggtttgctacataatagctcctaatattcgttccttctactgggaacttcttccaacatgaatatccatatagcttatccccatgctttatttagttccctgctcaagcatcacctcactagagagaacttgctagacgacctcttctataaaatagcaccctttagttttctctattttttcctgctttatttttcttcataatactttactgactgctaagtagtaacatcaatttatttttatattttcgagtgccttgcaaaaattagggtcttcataaatgtttgtttaactgaaattaattatcttagactattctatcttattctcatatgtaataaattaccagcttgtgactgtttatttctaggctccttcaacctattcatttgtttctatgcttatttccacttcttttttcactacactaattcagttaactgccacctgttttgtgaacaattgagtagtttctcaattttgttttgttttcctccagttcctcaacctgcacaaaacatctagcttactgctcttcaaatatgctattatcatttcattctttttcaatggcttcccataatccattgaattaaatgatattcaaatctctttatatctaattggaacctacctttccatagcactaaggagagttgtaaggaggtgagtacttggtgtaaaaattgcttatagatgtagttagcttgctatgagattaaaatgatttttaaagtacagagaaaaataagaaataactttaatgcaagtcaatatataatcaactgattatacgtgatttagtccacagatttatagaaattcagataaaaagatcattgaaaccttggctcatcagagagagcttcattagaaaaactgatagttgtttggggtcctgtatcatttattcattttatttattcagacccaatttctccctgtttttctaatacaaatatataagattttagagtaatggattctgttttgttaatataaaaatatttcttgtgtcagaagaattcagatgcttatagatattcttgtaaaatgttattatttttaatgagattgggtcttattccattactttgaaaatgtatacaactgagctgtttcttctgatcagcttatactatggacacttagtttgaagtcatattggaataatttggagaaaggtagaatttagtagatattacagaatttaggtatctattgtaaaatttaggttttatatagggcatgacattttttaagcgaatttataataaatagggctttttcaattatacagtaatgtaggttccaaagtgctattttgtgggttttctgtgtgtttagctgttttgtctgtacttatatttgtatttgtattgtacaaaggatataagtttctttgtagtttggataatcttttggatgaaagaaaggtagtgagtcatacaaaatagtgaaaaaaatcagatattttgaaataatacttctaattttccaaggatttaccaaaatagaggatgttaatttttagtatgaatttttaatgattggattggttttctgatgactgttttaattagttctgcagggcatcccatttctatcaacatagtgtgtgcaacaccttatttaccagtaatcaactcatatctactctcagtctgtaaagaggggtgtatatgaacctttacttgttattttttacttacgtaaatttatttacttttacattcctggtcaaagtgaataaacattttttatacagatgagttcatttcctcactcccatatccattccagtttctaagagccttctgattaacaggctccccaaaatttttcccttccaatttaaatttaagtaattagctttttcctaatttggaaccttggttagaaaacacatttgtttgatttgtcattagtttgggcatcttacttcaaatgaggtcatgtagctttgagtttagatgatcacagaagtgttcactgagcagcatcttcgtagctttgaggaaacagaaaaacaacttttttctactttgattatgattctttttgacagttgctttaactacagttaggtactggctgtaccagttccagtttaaacaactggactctgaacctgtttttgttctgattaagaagtttatttatatgttcaggaatacagcggcacaacctgttaacagctgtaaatttgcttgattaagctgtgtgtagacaaatttactagagggaactgttccctaaaaattccagttcacttacatatgaagttagtctggctgtttctcaccagtttccatcatttcctgccaagaataataaacattttcttgcaaagcatcgacactaaaggttagaagtgttcagtgttttatcaatcacactgggctgtcatgaatctcaataaacaaacacagagatatctatgtggatgcctggagaagccgttagaccctagaaaaataatttctttcagacagtatcctagaccttttcaaagtagataaatgtcaattatgaagagacatttattgtaatggaaataatggattcttcggtctagattttcatttactgacctagttcagggaagcttgtacttttagtggataataataagctagagcaagaaagtgtgttttcttaatttcatataactgtagatgctattatgagtattataataaagatgggtttattaatttaaacttatagtattaacatttctctaccatggtctgtcaggcaaactgtggctcacgactggtgcacagcgtgttattgtagcactcacaagttaagaatgggtttatagttttaagtgattgtaacaaacataaaacaaagaattttatatatatatatctagagagagcgagagaggagagagagccctcaaagtctaaaatatttattatctggccctttaagataaagtttgccaaaccctggtctatattagtagtaatagtttactaccagcattcaaaacgtgccagcaacaaagcaggatgaaattatagtcttagtgttagggtattttatttcttatttagtgttaggatattttatttcttatttgcatgtggtatataaaataaaaatataacagtatccttatagggttattgggagcattaaatcataactttttgtggtgcttcttacacatggaggacaataactgttttgttagctgttgctgttgttatatgtcagatgcctgacagttgtttcaactttgttttatgtgtgtatcttctgtttattctctgctctatttgcattatgtttaattttgtaagtcttttaaaaatctttttgattttagttgcaatgcaaattttaaaagtatagcagttttattgttcccattcctgtggctgtgtaacagattaccccacaacttagtggcacaaagcaatcagttattatgctcacagattctgtgggtcaggaattcggacagggcacagcaggaatggcttctcttagttccacagtgtttgaggctggaacctcaaaggctaggcactataatcattcattcatttatatgtctggcagatgtcactggctgttggccccagttcctctccacatgggtctttccatgtgatgtctccaaatgaactagtttgggcttccttaagtagagtgtctgggttcctcagagcaaacatttcaaaaagagaaagataggcagaagctatatccttcttatgacagagccttggaagtcacagaacattatttctattttgctctgttggccagaataattagaaatccccctaggttcaagaggagagaaatagactctaccatgtgatgggtggggttggcaagattctggaagagcatgctggaccagaaatacggctgaagccatttttggaaatatgatctgccacaatgatattactttatttaataattgcttatgtagcatttaatctatatgctagggactactgtaaatactaaacaaatattaattcatttaatccataacagtcttattttacagatgaggaaactaaatcagaatattgtattacgtagaatataactttctctgctcttgatggacaacaaataatttactatgattttaaaaacttgtctagtattatttaaacattaaatattttggatgcaaatttgcatttcctgcatgcatcatattagaatagacttgagaggtgcagtttctattaagtaatgtcttaaataagtacaaaggtcaggcatccaggagctcatccttccatattcttagaattgggatgtgataaataagtcagaattttttcatgaagcagtgcccagatgagtacatgttatcaaatattttatttgataataatgcaggactgactgaccaaacttgatttataaattagttccatgtccttttatgagaataaatacaatatcttggtcttgttgtgataatattacctaatggctatgttttccttcattggcattgaaatcagaactgatttttggtaaggttagtaatttgcgttatttttaaatctccattattatgaagatattttatcagggacaaagattgccttttctctctccctctccttttcttttctttctttttttttttttttcccattaacagttgatggaggaaggtaactttgtatgagttattgttggacatgcaagccctgtttttttacatttgttgattctgctttggagatttatcagtctctgagcaagttgctttgaagcatttcagtcttctttgtctctcagaacccattagtgctatcttcaggatgtgccagagtgacttttaccctggtacatttgtgacacagttacaccatatctcctactctctactcatcactgtatagcaagtacaagttaccagatagaagcatattcttgttggattatcaaaactcaggtggagtgtttaacatcttttttgaatatttaaatagtgtttttctttctaattggcaaattttgggtattctttaaaaacaatatttgattaggagatcatggagaaatttgtatggtcaaaacttgccaaatttgagactcacttatttgtttaaatttaaggatcagtaaaaataaataaataaataaataaataaatgtaggaatctaagatagagacctgtactattctgaatgtgaatgaactgattacattgattggaatacgtaatttaggagcattcattattactttttgacttggaaacaatataagaatgaatgcaaaaaaaaaaaaaaaaggagcatgtggattcattgctatcttgtttactgctcagtcacttatttgagagtgccaaaccctacccactagggccacccgggatgctttgtttatttgagagggggtgtggaggcatggtgaagggcaggagctccagagttaggctgactgggttttaaacccagccctcctgccatctgtgcaatcttggtccagttacttaaaacactctgtgattcagtctgcttttctgtaaaatggctgagttttctcattggtagaaatggcatctacttcatggtgttgtaaacattaaatgattaaatatatgtaaagtgcttaggatagtgcttagcacattataagctcataaatgtgcgctcctattcattaaatcattctttcattcacttattaaaagcatgacatttatttaacacctactatgatggggatacaaaggtgactactcaggagatatgaatattataatagggggaggcagaggtatattatagtcattacaacatacgatggtgtattagtctgttctcatgttgctaataaagacatacctaagactgggtaatttataaaggaaagaggtttaatggattcacagttccacatggctgggaggcttcataatcatggtggaaggcgaaggaggagcaaagtcatgtcttacatggccgcagagaagagggcgcgtacagaagaactgccctttataaaaccatcagatttcgggagacttattcactatcatgagaacagcatgggaaaaaacctgtccccgtgattcaattacctcccactgggtccctcccatgacacgtggggattatgggagctgcaattcaagatgagatttgggtggggacacagccaaaccatatcaggtggagagtgatataggttataaaacaaatatgtcaaagtgccatgaaaagaagaggacaaaatttttgatagccttaaacaatcgtttcacttttctctgacaccatttattcatttataaatgccttaccttttatggaacttttacagttcttcagcaggaaataatctctcctttattggcatccctatatcattttgccttatggcaattattattttctatctttcttttggcagctgttgatagtaatcattttgtatcttgttaaatcattatttgttcctatcttgtccattttacttgaagacagttcacagtcactcaacacagtacttatcaaaaatgcttcaaaaatatttactgagtgagtcaggtaacaaaacgattaaaatgcttagccatcagcgtatgcctctattttttaagggctttttataagcaaatacgggtagaaaaacattggcagtttgagagtaaaataaacatatataactcaccaactgactgatcaggataattatctgggagtctctgggggtaaaaagcccccagtttgttccattttacaactcccaccatggcctcagtcaggccaccaacatgatacaactagatgtggagtttggaagggtgtgcactggaacaccatcatatagtaatcctgccaactggatacaatagtgtaagcaaccccaagagcacagataatagtaaaatgtccaacatatttaacaaatgaggtgttttgagtatttattatctttgttttaatataatttttatttattggtacatttataacatttagctttaaatgatggctgtgtttaacaactggcttagaaaattcctgaaaatttagtagtcagctcttgtgaaagagtacaagccaactcacatacacttttacccaggctctgctgactgtgtaacttttgctagtaatttcactcctagaatctgtgctaaggaaattatctgtgaattggaaaaagcacaaagatgtttatcatagcattagtagtaacagcaaaaagttggaagcaacctaattgtttaaagtgagctgtggttaagtaaattcactggaatgttttctggaattaagtgacttctttgaagactttataacaacaagggaaaatgccataaagttaaatgaaaaagaaaaaagaaagaatgctaaatatctaatttatatagaatgatcaaaatttaaaaatatagacatatgctaatggaagaaggaaatgtcagtgtttggagctaataaggacatggctttttttctttaaccctttcttcattttccaaatttctaataatgagtatattttataattataatgaaaagatatatcatttttgtcacaaaaccaaattctaatttatagctctagttttttgttgaattacaaggcattatcaaaataaatcttttttattttattttttttgagatggaatctcattctgttacccaggctggaatgcagtggagtgatctcagctcactgcatcctccacctcctaggttcaagttattcttctgcctcagcctcctgactagctggaactacaggcacgtgccaccatacccggctaaatttttgtattttagtagagacaaggtttcaccgtgttgcctagggtggtcttgaactccggagctcaggcagcctgcccaccttggcctcccaaagtgctaggattacaggcgtgagccaccacacccagcctatcttttttatcttagaaatttaatattttcctctaacaaccaatagagcatataccaattgaatttgttttttagagatcaatgctgagttcattttgcccctagattttatttacagtctatcatagattttcatggaggattttaaagtttgaatttttcaaaagtatcctacattacaaaataaattttaggccaggcatggtggctcatgcctgtaatctcagcactttgggaggccaaggcaggcagatcacgaggtcaagagattgagaccatcctggccaacttggtgaaaccccatctctactaaaaatataaaaattagctgagtgtggtggcacgcacctgtagtcccagctactcgggacgctgaggcaggagaatgacttgaacccgggaggcggagattgcagtgagctgagatcgtgtcactgtactccagcctagtgacagagcaagactccgtctcgaataaataaataaataaataaataaataaattttaactgcagaattacctatttaaaaagctgcttagtagttaagtagctgattgtccctttaaaacaattgatagttatattgttctaaaattgagtctgggtctgtgtgtcccacattcgtgtctaagctatgcattgttaaaattttatttgaccatttatagcttgtctcactttgtgaaggaatttttcagaccttttcaaaatacatttaaatataagcagataatctaattttacacacttcctgtcccctttttaatcagtaattggttaacttcaatagacaatttagacaagctaagcttctgtgtaatttttctccctaaagattaagatttgatgaaataaataatctgtagcgtaccttgtagaaggaaaatgctttcctaattactttttaaaggtactaatttaaatgtcacagcaagttctgttaaggttttacttctattttaaggttgtaatatctgttaccactctatttacttggtgtgggcgagtttcaacaaggattagattttttaaattaattctctatatttttatgggggagaaattgaagcattccattatattgtaggaattcccggaacttcttagtattccttttctaccttgttaaaccattaatttgtttctatcttattcattttacttgaagacttaaacatttctgtatcactgacagccactcaaacagtactcataaaaaatgtgtcataaacatgtactgagtcaagtagcaaaaccttttaaattattcagctttttatgtgtctggattttgagtcatagacttgtgtgtgccatggggtataatgaatgggtaatggactttggagtaaataagcctaagttcaaagtctgattcttccatttaccagctgtgaaaacttgggtaattattctttgggcctcagacgcatctctgaaatgaatataataatccctagcttgtggagttgctgagaggattagagataaaatatgtaatgttccttgcatatagtaagcattcaatacatggttagttattaggcattcagtaataattgagtggatgactgcttcagggaaaatttggtggctgatttactgaaacacccagtaaacatatatgaaaaaaaaaaacacaccaaaactgacttttagttagaacagtttagagaaactgagagtcagtttataaaggagccttgcaaggaaactgaaaaggtgaaatagacgggaacaaaacctacagagtaccgctgcagtggagaaaagaagtttcagaatgctagaatggtggcagtggcaaattctatagtgaattcaaacaagaaggtcaataattggtcatctctggatttggtcacctttgttatttcccaatttctgtatattctttttatgatcatggttgacaaaagtatagcgctgaacataagacatgctaggaaggaaaatgatttaggaggtacagttgattcttgaaaatcatgggtttaactgcatgggtccaattatatgtagatttttttcaagcaaatttccattgcaaatacagtatttatgagatgcaaaacctgcatgtatggagggctgacatttcatatatgtgagttccagagggtggactttggaacttgagtgtgtgtggattttggtatatgtggtgcaggagtggccctggatccaattcccagtatatgccaagggatgactgtgattttatcagttaagattaggatgactgcgtataacaaaaaaagagacatctatcttatttcttgttcgttcttaccgtattgccacattgtccaatatggctgctagagattcagccattgcatcagtattacagctggcaggaggagaaaagaccaaaaagaatgtgccccttccctgtaaggacatttctgggaagttacacattgcactttctctttggctaaaatttagttctatggccacagctaactgcaagaatgacaaccagaaatattgtcttttggctgagcatagtgtacccagctaagctttggggttcttatttttaggaagcagaggaaaattaccagatcataacaaggtgatgagcatggcctctaatcctgcttttcttttctttctttttctttaacggggtctcactatctcacctagactggagtacaatggtgcaatctcagctcactgcaacctctgtctcctgggctcaagcaatcctcccagctcagcctctcgagtagctgggaccacaggcacgtgccaccatgcctggctaattttttatatttttcgtagagcccagggtttcgctatttgcccaggctggtcttgaactcctgagctcaagcaatctgcccatctcagcctcccagaatgctaggattacaggtgtgagccattgcaccagcctctttgcttttttaatgttttaactctcagcgtcttttaaaaacatcacttaaagttactttaaaattacactagaaatacacttccttttagaaaaaattaggaaatatagaagactaaaaaataggaaaaaactacctaaaattgtccactattaacatttttggtgtatatctgttcagactttttctgttaatatgtaaatattcatattacttatatatatagagtttcagtttgggatgatgaaaaggttctgagatggatgttgttggttgcgcaagactgtgaatataggtaatgctactcaactgtacacttgaaaatggtttaaatggtaaattttatgtatactttactgcaatttaaaaaacattgattgtttacaaaaaggagatcaaactcaacatattattttctaatctgctttttagaggtaagagaatacctttccatgtaaaaatatatatgtttgcagcatgatttttgtggctgaatatttattttatcctttaggtgtaccaccttttattgacaagagtgttgaagcaaataaacaggagtgttagttctttccttgttaagtggattcacagagagctttgtgatgcatgagagaggacctggggaaataaccagatgatggaaactgaatacccccctgggaccttacactgtgtctgccttgttcaagtgactctctaaataaacagttttactgctctgaggacaatatagtacccttttgtttttttcacatataattattatttttagttcatctaaaagaatgtcccaactaagttaatgttctattagaggactcagggcaaaagagagggataaagggagaacattgcctcctgagaaatgatgccttcacacgaggatcagatgccagtgatggcagcaatgtctgcaatttcgatattgctaagccactctcaggaaggtttttcctgattggaggtctggctctcccgtgagatggtgtttctcttacagccagaatgtttgtcattttcccatatcttcactgtcacagggtcattgtccttctaagtcttccctgccacttttagaacgtcattttttcacctactataaaatactctgcctctttgttatatgggtaaacaaattgctacctagctaaactaagtgttatttcttttctgtgctgttattgacatttgtcccccaactcccttccactttactcttcatcttatttacaggcataccttggagatattgtgggttcagttccagactgctgcaataaagcagttatagcaataaagtgggcaacacaaaattttttgtttcctaatgcatataaaacttatgtttgcactgtacggtagtctactaagtgtatcatagcattatgtctaaaaaatgtacaagccttattttaaaaatatggttaaaaaatgttaacaatcatctgtgccttcaatgagttgtaatctttttgctggtggagggtcttgccttgatgttgatggcttctgactaaacaggctggtggttggtgaaagttgggtagctatggcaatttcttaaaataagacaacaatgaagtttgttgattgactcttgaatcagtttatttgcttggtaataagagtagtacccaataggtagtttttcaacctatactcctctccattcctcccacccctagtagtccacagtgtctattgttcccatgtttatgttcatgtgtagtcaatgtttagctcccatttataagtgagaacatgtattgtttggttttctgttcctgcattaatttgcttgggattatggcctccagctttctccatgttgctgcaaaggacatgattttattcttttacatggctgtgtagtatttcatggtatatatgtaccacattttctttatccgatccattattgatgggcacccagattgatactatgtctttgctattgtgaatatcctggtgatgaacatatgagtgcctgtgtctttttggtagaatgatttattttctttcaggtatatccccagtattgggatggatgggtcaaatggtagctctgttttaagttctttgagaaatagccatctgttgttttttgacttttagtaatagccattctgactggtgtgagatggtatctcattgcggttttgatttacatttttctgacttttagtgttgatgggcattttttcatgtttgttggctgcttgtctctcttttttttttcttccaactcttatttcaggttcaaggggtacatgtgcacgttcattacatgggtaaattgcatgttgtggggtttggtgtctagataattttgtcacctaggtaatcagcataatacctaataggcacattttcagtcctcacccttctcccaccctccaccctcaagtgggctctattgtctattttcttcgttatgtcctggtgtactcaatatttcacttgtacttatatgtgagaacttgtggtatttgggtttttgtttctgcattaatttgcttaggataatggtctctagctccatccatgttgctacaaaggacatgatctcattcttttttatggctgtttagtattctgtggtatatatgcaccccattttctttatccagtgcattgttgatgggcagctataataggttgattccatgtctttgctattgtgcatagtgctgcagtgaacatacatgtgcatttgtctttatggtagaatgatttatattcttttgggtatatacccagtaatgggattactgggccaattgacagctctgttgcaggttctttgagaaaccttcaaactactttctacaatggctgaactaatttgcagtcccaccagtggcgtataaacattcccttttctccacaatccacaatctcatgaacatctattattttttggtatgtcttctttttttttgagacagtctccctctgtcatccaggctggagtgaagtcctggctgactgcaacctccgcctcccaggttcaagcggttctcctgcctcgcctcctgagtagctgtgattacaggcgtgcgccatgaggcctggctaatttttgtatttttagtagagatggggtttcaccatgttgtccaggctggtcctgaactcctgacctcaagtgatctgcctgcctctgtctctcaaagtgccaggattactggtgtgaggcaccgcacctgacctgctttttggtatgtcttcttttgagaagtgtttgttcatgtcctttgcccattttttaatggggctgttttttgcttgttgaattgtttaaattccttatagattctggatattagacctctgctggatgcagagtttgtgaatactctctcccattccgtgggttttctgtttactctgttgatagtttcttttgctgtgtggaagttctttactttaattaggtcccacttgtcaatttttgttgttgttgttgcatttgcttttgggggcttagctaaaacttctttgcccaggttgatatcaagaaagttattttctgggttttcttctaagacgtttatagtttgaggtcttacacttaaatatttaatctaccctgagttaatttttgtatatggggaaaattaggagttcaatttcatttttctttatatggctagccagctatcccagcaccatttattgaatagggagttcttttcctattgcttgttgtcagtcttgtcaaagatcagatgattgaatgtgtggctttatttctgagttttctattctgctgtattgatctatgtgtttttataccagtaccatgctgttttggttactgtagccatatagtacagtttgaagtcaattagtgtaatgcttccagctttgttctttttgcttggtattgctttggctatttgggctctaaaattctatatgaattttagaatagttttttcctaattctttgaaaatgacattggtagtttgataggaatagcattgaatctgcagattgctttgggcagtgtgaccattttaattatattgattcttccaattcatgatcatggaataatgtttcttcatttatttgtgtcatctctgattttttcagcagtgttttgtagttgtccttatagagatctttcccctccttggtttgatgtattcttaggtattttatttactttgtggctattgtaaatgggattgtgttcttgatttgattctcagcctggatgttatggttgtatagaaatgctactgatttttatacattgattttttttaaaatcctgaaacttttctaaaactgtttattagccctaggaggcttttggcagagtcttcagggttttgtaggtatgaaatcatattgtcagtgaagagagatagtttgacttcttcttttcctatttggatgcctttttatttattttttatttttttgcctgattgctgtggctaggatttccagtagtatgttgaatagtagtggcgagattaggcacctttttcttgttccagttctcaaggggaattgtttcagctcatactcattcagtatgacattggctgtgggtttgtcatagcttttattattttgaagtatattcctttggtgcctactctgttgagggtttttttaatcacaaagggaagttggattttattgaaagctttttctgcatctattatgatcatattttttgcttttaattctgtttatgttgtgaatcacattgattgatttgcatatgttgagctagccttgcatctcaggaatgaagcctacttgatcatggtgtattaaatttttgatatgctgctggattcagtttgctagtattttgttgaggatttttacacctatgtttatcagggatattggcctgaagtttgctacgtttattatgtctctgctagattctggtatcaggtaatgctggcttcatagaatgagttatggaggagtccctcttcctcaattttctgaaatagttttagtaggattggtaccagttcttctttgtatgtctggtagaatttggctgtgaatccatctggtctaggctttttttttttttttttttttttggttggttggtagggtttttaaaattattattattactgatttaatttcagaactcagtattggtctactcagggtttcagtctcttcctgattcaatcttgggagactgtgtgtttccaggaatttatccactttctctagatcttctaattagtatgcatagagttgttcaaagtagtctctgaggatctttcgtttttctgtgggatcagttgtaatgccatctttgttatttgtttactaatttgatctctctcttttttgttaatttagctagcagtctatcagtcttgttgattctttcaaagaaccagctgttggttttattgatctttcgtatggatttttatgtctcaatttcattcagtttttctctaattttagttatttctttttttctgctagctttgagggtgtgttttttctgttagttgtaaagttagattgttaatttgagatatttctaacttcttgatgagggaatttcgtgttataagctttcctctcaatgctgttttagctgcatcctagaggtttttggaagttatgtttctattttcattattatcatttttttatttctgccttaattttgatgttcacccaggacttattcaggagcaagttgtgtaatttccatgtatttgtgtaattttgagagatcttgttggtgttgatttctgtttttattgcactgtggtccaagagtgtgcttgatatgattttgaattttttgaatttattgatacttgctttatgatcaaacatatggttgatcttagaatgtattccatgtggagatgagaagaatatatattctgtggttattgggtagagtgttctatagatgtctattaggtctaattggtctagtgtcgaatctaagtctagaatttctttattagttttctgcctcaatgatctttctaatgctgtcagtggggcattgaagtccccctctatttttgtttagctgtctgagtcttttcataggtcaagaagaacttgttttatgaatctcggtgctccagtgttgggtgggtatatatttaggatagttaagtcttcttgttgatgtgtaccctttatcattatgtaatgcccttctttgttcttctttgttattgttttgaagtctgttctgtctgatataagaatagtaactcctgcttgtttttattttccatttgcatgctagatctttctttatctctttacttggagcctgtggatttcattacatgtgaaatgaatctcttaacagcagacggttgagtcctgtttttatattcagcttcccactctgtgtcttttacatgggatgttcagctcatttacattcacggttagtattgatatgtgagattttgatcctgtcatcatattgttgcctggttttcatgtaagacttcattgtatagttgctttatagtgtatgtaggcgccatgcttaagggtgttttgtggtaacaggtgtcattctcttgattccatgtttagcactcccttataggcctcttataaggcttctctagttgaaatggattccctcagcctttgcttatctgagaaggattttatttttccttagtttatgaagcttagtttggtgggatatgaaattcttggttggaatttcttttctttaaggatgctgatagtaggtcttcactctcttctggcttgtaaggtttctgcttggaggttccctgctagcctgatagggttctgtctgtacatgacctgacccttctctctagctgcctttacaatttttgtcttttacattgactttggtgaatctgatgtctgtgtgcctcggggatggtaatcttgtatggtatctagctgagcttctctgtatttcttgaatttacatgtcaacgtgagattagggaaattttcgtggactgtatcctcaaaaatattttccaagttgcttactctctttttttctcactcaggaatgccagtgagtcatagatttgatctctttacatgcgctcatatttcttgaatattttgttcattttttaaaattcttttttcttggtgtctgactgagttgattcaaagaactggtcttcgagttctgggattctttcctcagtgtggtctgttccactgttaatacttccaattattccaattatgaaattcttgtagtgaatttttcagctctagaatttcagtttggttctttctgaaaatggctattttgtctttcagctcttggatcattttactggattccttggttgaggtttcaactttctgctgaatctagatgagcttccttgccatctagattctgaattttatatctgtcatttcagactggttaagaaccattgttggggagctagaggactcatttgtagttaagtggacactctggctttttgaactgccagaattcttgcactgattttttttctcatctgggaagtttggtgtttctttatctgtgatgcaggttgagtatagtcagttggcgtcatttctgggtattttcagagggtcaggactctgtacagggtctttgtggctgaattcttgcccctggtttcatggagttaggggggcatattaccaaaatatttttggtggtgtacttcaggctgtgatctggtagatggcacttaagagtaatgatcagtagctaggcttttattcatctgtgtgtcttctttgtatttcctcatgttgcagtcatgccctctgtcaccagtacgttggggagagagatgacctttccaccaggtttgcttctgggccttgggggagccccctctgatcactgttaccatgcctgcctttcttttgctaggtgttctgggccatgaggctctcttgggcagaaaccatggcagggagataggccacaccctttctatattgaccttgcagagggatgcatgccctgcttttatgccaacccagaaacccacacatctcaccccctcagtgctctgtgagtatgggctcctcctctgctccagtgccagccacataactcgacttggcactcccgagctgtccaccacagccctggggtgccgggactaacttggggctcatctgctggaccctcagagttgggttttggatattttgggggatctgaagtgctcccaggctgctggaaatgtactcaagaggagcagagcatccaggctggacaggagaggctgcactgcacacatgctcttgcagtggggggtcagggaggggccctggaaggagatggcaggcaagtggtcctgtagcacagatgtgcccccatgctggccctactttctcctgcctcagcggtcagctgggttagagcttcttggagggagatggggagccctgggagatgggtgtctatggctgtgctctgctggcctctcccacgcacagaggtccttggctccatgctggctgaagccctgattctgtctactccctgggcatatccctttgccagctcaaatatccatggtggatgtgggttcccctgtagctaggattccagaggtccacagtgatagtgtgcagtcccacagtctcttcattaaccctctcccgtggagctgttcagggctgggaagtagccctaggctttgggtagctcacacagggttcccagcttcctgtctcatcagtctcagtatctctgtcacatctccatctactttcagtgtttcttctctgaagatccgttcaaattgtgttggtttacttgaaattttggtctctcttgtggggagcagtgcttcttggcttcatctagtcagccatcttgtcctttttcaaactttttttaaaatttgggtcagtcctctgaaaccctgccactgctttatcagctaagtttatggaatattctaaatcttttgttgtcatttcaacagtgttcacagcttcttcgccaggagtagtttccatctcaagaaaaaaagtgttatccataagatagatccataactctttttggtaatccataagaaataaatgcttttctctcttttgttcaagttttatggtgagattgcaacaattcaatcgtatcttcaggctctacttctcattctagttcttttgctgtttttcccgcatctgcagttacttccttcactggagtcttaaactcctcaaagtaatgcatgacagctggaatcttcttcactcctgtgcatgttgctattttgaccttttccagcgaatcaggaatgttctgaatagcatctagaatggtgaatccttcccagaaagttttcaatttgctgtacccagatccatcagacgaatccgtatctgtggcacttacagcctcttgaattgtgtttcttaagtaataagacttgaaagttgaaattaatcctcgatctatgggctacagaatgggtcttgtgttagcagtcatgaaactgctattaatcccctggtacatctctattagagctcttggttgactgggtacattgtcaataagcaatactattttgaaatgaatctttcttctgagcagtaagtctcaacactggacttaaaatattcagtgaaccacactgtaaccagaggtgctgtgatctaggttttgttgttctatttccagtgcacaggcagagtagattagcataattcttaggagcctcggatttttggaatgacaaatgagcattggtttcaacttaaagtcaccagctgcattagcccattttaaaaaaagtcagcctgtcttttgtagctttgtagccaggcactgacttttcctctcaagctatgaaaatctgagatggcatcttcttccaatagaaggctgttttgtttgcatgaaaactctgttgtttagtgtagccaccttcattaatgatcttatctagattttctggataactttctgccggttttatatcagtacttcctgcttcaccttgcacttctataatatgttatggaatggaacggcttctttccttaaacctcatgaagcaacctttgctagctccctacatttcttctgcagcttcctcacctctctcagccttcatagaattgaagacagttatggacttgctctgaattaggctttggtttaaggtagtgttgtggctggtttcatcctctgtcagatcaccaaaactctccatatcagcaatacggctgtttcactttgtattatttatttgttcactggagtagcagatttaatttcccttaagaacttttcatttgcattcacagcttggctaactgtttggtgcaggaagcctagctttcagcctatcttggcttccaacatactttcctcactaagcttaatttaaagtaagagacatgcaactcttcctttaacgtgaacacctagaggccactgtagggttattaattggcctgatttcaatattgttgtgtctcaaggaataggaaggcctgaagagagggagagagatgaaggggaatggccagtttgtaaagcagtcagaactcgcacaacatttatcaattaagtttactgtcttataaggtgtgtttgatagtgcccctgaacaattacaagattacatctgtattagtccattttcacactgctgataaagacatacctgagactgggcagtttacaaaagaaagaggtttattggacttacagttccatgtggctggggaagcctcacaatcatggtggaaggcaaggaggagcaagtcatgtcttacatggatggcaggcaggcaaaaagagaacggggatcaagtgaaatgggtttccccttatcaaaccatcagatcttattcactaccatgagaacagtataggagaaaccaccctcatgattcaattatttccacctggccctgcccttgatacctggggatgattacaattcaaggtgagatttgggtggggacacagagccaaaccatatcaacatcaaagatcactgatcttaaatcaccataacagataaaacaatgaaaaatttgaaatattgtgaaaattaccagaatgtaacaaaaacacatgaagttggaaacatggtgccagtagagttgctcagttcagtgttgccacaaaccttcaatttgttaaaataccagagaggctggggtgggaagatcgcttgaggttaggagtttaagaccagcctgagcaacatgaagaaaccctggtgtctttaaaaaaaaaattgttcaatgaatcaatgaatgaacggcagtttcagatattttccactcttctcaaacatcttacatgtcatttctatcttgatcctcagcaaataactatttccaagtcaatggtaagaatagaaatctgagatggaaaatttcttcctcatttaccatcaaaactacaaatattctcccatgattattttcctctgttgcttctgctctgaatgatatgactttttttcttttcctaaaaccctaggttccatccacattcaccttagaaggattttgatttttctctgattctatctttctcccaaattctgtatgtagcctagtgattatgagcatggactttacaatcaggctttgtgtctgatttgactcaaatttgtgtctgttactatgaaatcttgggcaaattatgtatctctcagcctcagttttcttgtgtgttgaagataataatacctaggtcatggagttgtcgtgaagatcaaaagtgatatctttaaagtgctaagcatagcaggtacacagtaagcatgcaaaataaaggtccttgcattatttttacctccctttctagtggctcctaaccttattaagagtctcttgtcttaagaaattgttctactacttcagtatttagcactctctctctctcttcaccatcacagctattctccactttttatctcctatttattttggctctcacatcagcctggcttcccaagcatttcaaattttatttttaatcttatttcttttccacccctttctctccaaatttgctctgcttccaataagttcatctatcatggctcaaatcagaaaaatagcagatgcccttgttcttttgccctctctacatttaatcatcaaacagagttctgataattctgctgcctaaatagttcctaaatttttctacatctcttctttgggtgctaccatttcagtccaaggcactatcatctcacacagtattgtgacaatagccttctactattctcccctttgccacactattccatactccacactatagatagagtgataacaagaaatgttatttccctttataaacattctaatgagttttcttgctcttagggcagagctcttcttgatcaggtcttatttatctcttctttcagctctatcttataccactattaccctgtgcatgccctagctctgatgagtttctttcagtttcattcagatctcttatttcagcttttccacatagtgttcctctgctgccttcctgatccttcttggggatcattgctacttggcctctggtttcaacctaaactttacttccttgagtgaccttcgcttaggctaggtacttctgtggtctgttctttattaccgtatcatcatggtgctcatgacattttacagttccttatctccccccaagattccagaaggcaggagccatgtctttttcattctctaccacaatgcctggcctatagtagacacccattaaaattttgttaaatgttgttaaataattaaagcaagagaaaaatcatcctatataacatgttagggtttagaactacatatggtattcctgtatttaactttgaatatttctttaaacataagtaaatgtggaaaataataatgctgcttttcagcacatgctcttatttttctatcttcacacattccctaattttaaaatctctttatgtttgtttttattccagactacaaacatcaaatcttttttttttctatttggatgcttttaagtataaagtgtcacttaatatcagcacttctgccaactcttattcatttttccagctgtatttggacaacatttacatagataattttgtgaaattttcaactagaagttgagttgagataaatcatgcagttttcaattcagtgtatcctgaaagataacgaaactcactgagctgcctggttttccaacaagctacatagaaagcatgaggagggcagaaggctatggcttccactgttttgaccacttcacagcccttcccgcagactgcttggagatggctcaagtggaacctgttgataaattaatgatcctctttttcccagtcaccattgagccaaagtaggctatggggctgaatcatcccagacagggatgaatgaatgttctgaaaagctgaaacataaactgtcagttaagatgcattttcttcaagtttatttgtgacagatgatggaaggtagttgatattgactgagtttgattgtttcttaggaacaatcacagtcatttgattgttgttcctaagaaagtagtctttttaaaaaaacaaaatctgagatacaaatgaatcactatatgttaattttccttgcccttcttaggtgaccactgactatattttaccagttgttaatgtagctttgggggggattttgttcatttttttggtgcaccttggataaaaaataattggaaatatttctcattttgcaattactgacttttcatactactggaatacaggatttgtcagagttcttatctgacccagaatagattagacacgttttaagatcagtaagaatcatctgctttttttttttttggtggtggggtgggaacatggtcttgctctattacccaggttggagtgcagtggtacactcacagcttactgcagcctctacctcctgggctcaagcaatcctcctacttcaggctcctgagtagctgggactacaggtgcttgccaccatgcccagttaattttgtattttgtggagtcagagtctcactgtgtttccaaggctggtctcgaactcttgggctcaagtgatcctcatgccttggcctcccaaagtacaagtattgcaaatgtgagccattgtgcccagcctatttgtcttcttaagcctacaataagaatgttgaaaagatagtttatttatataaccccatttgatacaaaattcacatcaaatagagttaattaaataatggatgtcccttgttcatcatttcaggcagatacaaataccacttttagcaaaaaaggtaaatctcttgttttaagttacccagacgaagattatatagaaagttagggtaatgacattcccaaggcaaaagttcttcagggaaaaatagtaagccatttcagtttctcaatttctggagggcttatctgaagggattgggatgtctaatattgcaaattaggcaaattgtgcacatttatcaccatgcaccttggatttcaagcagaaataagaggaggatttgactgaagggaattaactttggtcttccaaacttaaatatataccagatgtgtactgtggaaggatcttcctggttacagtataacctctggttcttttggactcttgctaacttaatttacccagttcttttcccgtatagaaattagactgtggattgtttctgtggattatactcatggatttctgtggattatactcatggattttattgttttatcttatttacagattctgacttttttcttttctttctctttttaaaaataacttaagatgtttgtttggaagattggcaggatgttcgttttacagtgttcaaaaatgagttgtttgtgttttatgtatatgcccaaatactctgtgaaaacataaactgataaaaggaaaattaattcctatctttataaagtgaagaattgtttttttttaacaaattaacatatcctgagttacattcttgagtgagatatgagaatttaaacatataacatgaatacccccagttttgagtgctaatatgcaaggaaaggctttcctcattactgttttacaacttttatgctccataaggttgattctcagtgctagttctctttcagagagaagattcagtaaaaaacactgtataccagtccttaataacttaaatgcaaatactggcatatatccagaagctaaggttcaattaggtgtagttgtttcatcttacaaaattattttaccagcaagaaatcttggcagttatattgatgatttctcatgaaagaggcaaatgggacgataaagaggcctgaagactattttttaatactaattttctaattcctcatttttttaaatgtcagaagccaggccttagaaatcaagcacctgagttttcctctgattttctaatcattactgtggttattctagttgtctcttatctgttcggaagtcataatgtgtaatgatggcataagtgaatgttaaagaagtggaaatttgatatgatctagatggcagtttattggtttagtttcaaagacaattttacctggaaaataaataagaaagcttatcaagcttttccctgttatccgtggtttatctgttccttgtgtttcatcttgaccaccactggtcttccagaaatcgctaaaatctctcctgcctatgtcatttctttttccttacaagatcaaagcttttatgagcattatttattgtagcctcacaatattctagagagcaaagtagaggttatgtgtctccatctttatttttaaagccaagtgaggaacagataaatctcttcgctaacgttacaaaatgaagcagtggtagaggcagaaataaactcctgaggcagaaacatctcctaattctggcccttacgtctaagatgcagtagactgtttggcctttctctaaacaggcctttgacatttagggtatgtggaaagtatgtgctcccgtcagagtttcgctgtttagttattctttgcctgttaaagtaatgactagaagactggagaaagcagaaagaacatccaagtcttatttcagcctctgcgtttagtacatgtgagctttggacagagagtgcctttatttcctgggaattaacttttctctctttatacttagaaggaatttttctttggggcactgctgatattgagaatttgggggaaattattatttttttcattcaagttttatgtgtgaaaacatatattccaatactagaccacactgagaggatttggggagatgactgcaaagttttacattttaaaatgtaggtttagtgccttttttttaaacctgaaagtcattgcaaaaatcgattaaattttaaaattgacttaattcatcaatctatattgctataaagttttttaaaaactaacaacttgtttgccctatgacaaatatttttaaaaataattttcaactgtatttttatttcaatatttatcaccctgtggttattttattttatgattttagctgtttcacttttttttttctttagtatccataattgctgattgggaatttttaacacaagacaggaattgttaccctccctccccccctcccttccttccttccttcctccctcccttcctttatcctttctcctttctcctttccctcccctcccctcccctcccctaccctcccctaccctaccctccccccctccccccctcccctcccctcccctcccctcccctcccctctcctctcctcccctttcccctcccctcctctcctctcttcttttctttttttcctttctttgtcttgctctgtcaccaggttggggtgcagtggcacgctctcgctcactgcaacctccgcctcctgggttcaagcaattcttgtgcctcagcctcccgagtagctgggattacaggcacgtgccgccacacccagctaatttttatatttttagtagagacagggttttaccacgttggccaggatggtctcaatcttctgacctcgtgatctgcctgccttggcctcccaaagtgctggaattacaggtgtgagccaccgtgcctggctgcctctttctttttttaaagggctgcttttcatattgacctacatgactaaacctgagttataattcagaagaaacagttgaactattgtgtgccatcttgtcataaagcgcaggttagcacaaatgtcttgccaatgtcttaaatgttgcaatttttgtaaaatcttccgtgtgcctccaacatctccagttggtgaacagatctcactgtatttatccctgttgtgttcttccacatgtttgttttgcagcataataacacttgacagttgtaaatttttccgtatgttctgttttgtagagataaacaatgtactttctgtgtatttccctgagctttgaagacttaacttttgaaataaacaattccataggattttataggaggctttggtacgttattcacacaaactattctccttgaaagggaaggtagttgaatgttcatccttttgatataaactggttaactgaacttttccaagggatcaagcacaacttaactgcttttagctttgcaaccagggcaatgcagaccagaccagtgtttgaaagtctttaaaagtattatttgacatcataaatgaccattctgtggaataagctctctaattctctgagtggtttacttcagttagagggattagtgaattagctttggatttgcttataatttcctcttttatcttttacaaattaaaaagttggtatcggcatgtaatgatagcatctaaaacatttatgttgtggtggttgtatcatagaaaacattctttaggattcaattataagcagcctccttccattagcatgtcaagtttttctgagcagttttatttgtgaaaaatcagtacagatatttttattcatagcttgatatcctttttttttttcttactcaaatgaatatctgtttcctacctttctccctcaagatgcagtggtgcttttattatttgattttgtaaagcctgaagggcagaaatatttcttaagttttccattgttaactacaaacttggctatataaaatatacaaatcataatatctgtatggttatttttattgtcatttctttaacacacaaaatttatcacatttatgcaagaattttttaacttagaaaactcaaaattgatatgtaaattgggtggtagcaacaatgtgtgggatgtggtacgtggccaatgatgtgttggaggcagcccccaccagctcccaagatctagtgattaaattttcagaaattttgtgagccagttatcagtaaaaattaaactatataaacttacaattaaataaattatttaaaaacaaagataatactcaaaactcagtaattatgttttactacattttattatctatgctcttgaggttatttgtgtctcttgtatctgtattggaaatactatataatggtgtatactattgtatatctcttcacaacttcatgttcattaacatcatgttgatagcttcaaattagccatggtagaagtattaacaccatgaaaatcagcaaacacaaccaatcaggggctgatttattgttttgctgattgtctagacttaagaaagtgatggaaaaaatgttaataacacatattaaaaagtgtgttatatctggccgggtgcggtggctcatgctgtaatcccagcactttgggaggctgaggcaggcagatcacaaggtcaggagatcgagaaccatcctggccaacatggtgaaaccccatctgtactaaaaataaaaaatttgctgggtgtggtggcgcatgcctgtaatcccagctactcaggaggctgaggcaggagaatcgcttgaacctgagaggcgaaggttgctgtgagccattatggcgccactgcactccagcctggtgacagagcgagacttcattccaaaaaaaaaaaaaaaaaaaaagtgtgttatatatctataaccattatactatgaatagcaccaaaaacttgagaaaatattctttcaggacagtatttgaaaactattatctaattcattggagaagtggttcacgtcacagacaagtgaatgactgaagtttgggcatatgcctgtgtttaccttttatttattaactaaacaaacccatcagccttctacagcaaaattgtaagaatgagatgttgcttcaagtacatcagacattagatgctacatacatcaggaagccttttatagttctcttttgaaaactgtactactcataatatgctgtttcctactcacctatgaccctagacttcctgtttgctctaatggttgctgttaaaggtatgacaaattcagctgtaaagtgtttagttatccacatccatctctttgaccacaaattacctaagaatggtgttacactacttttgtgggaaaagagaaacatcataatactggatacataaaatcatagcttttcctttccttgggggaataattctgttatctacccactgttgggaggtagtttagattggttaatgtaagtatcaagggggaaaatggctgtattcaacagaatttgtttcccttaatcttatggatagcttcacaattcatgatagcatagttatgcaacatatatgaataaggatgaagatgagtatcatttgattaaagtatagcttctaagacttaaatgaccagaaagaattgaactgcgtttaaactctaccacacacctgctccttatagtaggataatctggtcaagcccttgacttcaaggagcttgctaaccctggtattaattgatgtttcccaaactttagtcaactgagtatcatcctcaccatatttgttctatctctgtaccgcttgtacttttatttactttgtaattttttaaattaactttttcttttaaacttagctttatcctaagtgataatactcatgaaatcttgggtttaaggtaatagttatgttttttctagtatctattaaaatattgcctaacaattacaattttagaaagacttttctttttaccaccaatggtatgtctattttgctttgggaactattgtgctagtgatgataatagctaggcattaagttaaattgtcttgtttgttcctcacatcaatgtgataagcgttgctctctctattcagtaaatgaagacaccaaaaaatcagagaagttcaacaacttgtccaggtcatgaggcaagccagaacttacctgggtaaggtccatatgagcccttggtcctcacagcattcttagagaatcacccgggagctttttgaaaatgcaaaatctctggcctcactccagacctcctgaatcagaatctgcatttgaacaagatcctccaggtgattctcatgcacattaaagtttgagaagcactgagcttaacatttgggtattctgcctcccgtaggagaagatgggtgactgggtcattagtttggttgttctgtgatctggtttggctctgtgtgcccacctaaatctcatgttgaactataattcccagtgttgtgggagggacctggtgggaagtgattggatcatgggggtgaatttcccttttgctgttcttgtgatagtgagtgagttctcatgagatctggttatttaaaagtgtatagccctttccgcctttgctctctctcctgttctgccatgtgaagatgtgcaggcatccccttcgcctcctgccacagttgtaagtttcctgaggcttcctcagccatgcttccttaacagcctgtggaaccgtgagccaactaaacctctttctttataaattacccagtctcaggtagttctttatagcagtgtgagaatgcactaatacagtctccttgtctctctgtagtgttattttcttcatgccatgctattctgagctgcaactatttttgagccatgtgatattgatgctaaggtagaagataatattctcaatccttttgattattttttctctcctaaagtcataatttgtccactttccttccttccttaattggagtaccaggactagcctgagggtcaacatttatactctcttttttttttttaatccttgttttcttccccagcagccacaggtcaagttcttgccccttctaatggtctggtcatttcttttcctgtctgcctgaaactggcagaccctgagaactgtctacaggcctatagctaattctcagtttttcctggatagttttaatagtatggatgtcatcctgactcttagcttcttttccttctcccaccagttctctgccattcagctattttaccgctgcttttctttttactaagatgtgcctatctctgcatccatgaggcctctgtttccattctaccttgcagccatctgcttctcacttttgctgttgttgctcgtaattgtaagtttaatataagcagcagcctcaggagaccccatgaaagcaatcttctggaaacagtcaaagtgctgggaatttgatggttggatctgggaatatcaataatgtctacaactgatgaatgtagctggctatagattctgaagtactccagtgcgtcatcagcatttcatgagtatactgtctgtgtgattttttcacagagtttccctttgaattttatgtctgcagagtttctaaacactgcacctggctcatacagttacaagccttctttctcagtatttatatagttgtttattcagtctccaagatgattagttatttgagatgagtagaagttgcatctattcatgtaatcagagcttgttttcttgctcactggtggccagatacaggtcataatagtattttattttcttaactttgaatagcgttaaaggggagtggactcatttgaattacaggaggtactgaaagaaaactatattattcattacattttgtaaagcaaggaacaaagaggaatagttgtttcctaccatggtaatttcagactctgaaagatctgtttataagccaaatgtagacatacctatccctaacccagatttttttatggtcttcaattttgtaattatttagaattgaagggttttttttcctttctgccacatatttttgtacacaccctttctccctcccctttcccatgcttttgtttccttgagaaaaggagcgtccctcttagagcatagaataaacattctttgtgaagtgtgacttatttatgcttcaggggttgtcagtgtatacacaatagagaaggtgatggaggctccgaggcatgccaagtcagcactttgtgcatgttgaggccaaagagcatgttaagcaggcttaaaaaattttaacaagtcagaacattttacaatttccatatttatcaaacatgtcaggggatgggatcacaaagccttccagggattaactgcctctctgacttgaactgttttattaagatggaagaagccaagttctcaacaccctgtgatttgctctaataaccacaagaatcagaatgtaggtgatccttgctgaatgaaagcaatcctaaggctaaatgctctttgaatggggaaaaaaaaaaactctctcaacagatgaactatgtgtgaaactttctaacagagcttaggagtttgaagtttatttacctagagcttcagttttattaattctctggttggtggttcttgacctttgacacccaaggacttagactgtgaagcctaaatagaaggcattcagaaacctgaagacattctcaaagaggggtggccattggcttttttggggttggcaaaacatcctagagttattatttgtttttacatgtttggggtttggcagatcctaagatgcattttgccaagcactttcctttgaattttagtacaggaatatcttgggtggaatttaattcgtgattcatttgcattatactgatcagaatgccattttggaaaagatatctgatgactgagaaatattaggagatttacaatttttaagtaccaactttttcttagatgggaagaaaaatggaattcaagccccaattattttcagtgagatttggaacttggaatcttgaactaagtagtagtttccaaatgtgtctgtattactttctctacaaaagcgaaccagactacttccctggcttgatctgcaaatctttagaaaagttacagagctgatatgcaaccttgggctggtatttaatttgaaaactaatgttaaaaaggctttctgataagtaagtagggagagtaaccctcttctgaagaaatagattggaattaaaaaacaaactaagactaagcataagtgagatcttgggtttgaaagccaaattgccaaagatggcaaaacccctagagggctaaagttatgtgaagtgccatgaggtagcttttccattactgtttgcagaaaaggttgtaaaagaaggaactgtgctgaaactttacaaatgagtaccaaaccataaactttttaaagaacagggaaagcacatagctaaatatggtacccaacattattgcccatcaggctgcaacaaagcatgatgacaaaaacaggttttttcttgtctactgtcagcttcctattgtttgtaactggcccaggaaaagcagtgccagcaactcaaatgactgctctcactgtcttcttgagaaaacagcagtgcaagcaagcgtccatcaggaaaagaaagaagcattttaaacaaatttacatggatatctttaggttcaaattattttgaaaccaaaggatatgaagtgttgggaattctagttctgaattctataaatcagtgtaaggagaaggacagtgtgatagagactcttttatttgcttcaaatagtggggtgaataagttataagagtatcactgggccagtgttgatgattttcttttctctcttgttccccatgttcttcaaactgcttaaaagtcaaaacacaagatgtattttgagttcttgaccttatcctggccctgacttagtttgtcagaatattaggttgtctacagagatccaccctggtttccatctaaatttttttagattttggtcaactttctatatctttatttaaataactgtaagtattcctttcagtataataaaaatttatgtttttcttcttcttaaactttggtccttgtccttgttactttaaaacagagaacttagtaaagataactttttcttttatttctcatttttctctttctctctctatacccctctttgcttgcccccgcccccaaccttgtctctttcttactggctataatctaattagtgaatgcttatcaatgaccaatgagaacattgtcacattttacattttgcttgttactgaactgtaatctctgttgcagaaagcaggatttttgtgaggttgaaaggaaagtgtggcatcccatgagtctgatgctattacgttttagaaaattgaaatgactggccaggcgtggtggctcacgcctgtaatcccagcactttgggaggccaaggcgggtggatcacctgaggtcaggagtttgagaccagcctcatcatggagaaacctcgtctctactaaaaatacaaaattagccaggtgtggtggtgcatgcctgtaatcccagctactcgggaggctgaggcaggagtattgcttgaacctgggaggcagaggttgtagtgagccaagatcgcgccattgcactccagcctgggcaacaagagcgaaactctgtctcaaaaaaaaaaaaaaaaaaaaaaaaaaagaaaagaaaattgaaatgacttactacattattgagagcatatcttagctttggataataaagaatatagataaacattttaagagcagctcttgtttcatacttcttatctcacacacagtgccttttacacaataagggctgaataaaattgttacccattttagttcagttaatttttgaatgtgagggcagatcatttaattccgtatcttaatatataatccaggactggtgaataatacttcctgccaaaaatccattaaccttacaggaaacaaaacccagtgaggatcatagaagtaaaaataacttaatttagatttcataagttgttatttttttagagaaaagcataaaatgttctgtacctgcacatttgaaaataaaatcaagaagcaaaacattctcatgagtaagaatatgaaacaataatttgaaaataccaaaactcagtatttattactgttctacagtagatattagtgactagggaaaggacaaggtggctatggggtagtagaaaagggagccagatatgcaaacctttggggatgatgatttaactgcttcatgacagttaagaaaagatttattttttttagggtttaaaattactatatttaaaaatatataaatatttgagttttttcctcaagtctggaagcagaagcattcctcagtctttctctccttcgacatggcagcaacagcaacagcagcagcagccaccgctgctgccacggccctggctccacctagggaaattgcagaagaccctatctcattctagtgaggaaggttctatgaagtagatagttcatcttgtagactttttagaccattgctgtaaaagacttttatattttttattttttgagacaaggtctcactctgtcacccaggctggagtgcagtggcacaatcatggctcactgcagccttgacctttcgggctcaagcaatcctctcacttcagcctcccaagtagctgggactacatgcacatgccactctgtcagctaattctttttgtagagacaaagtctgactttgttgcccaagctgatcttgaactcctgggcttaagtgatcctcctgccttggtctccggaagttctgggattatagatgtgagccaccatgcttggccctaaaacttttagagccatcttcaaatgttgtgattgtctagctggacatggtggctcatgcctgcaatcccagcactttgggaggccgaggctggtggattgcttgaacccaggaattggaggccagcctgggcaacatggtgaaaccctgtctctgcaaaaaatttaaaatagttggggatggtggcgcagcctatagtcccaactactctggaggctgagatgggaggatcgctcgagcccagcaggctgaggctgcagtgagctgtgatcatgccactgcactccaacctgggcgacagagtgagaccctgtctcaaaaccaccccacctcccaaaaatgctgtggttttctgtataaaatgggactaactattgacacttctttataaatcagataaaattatattgaagtccagtttaagctcattggatgaaggatattgcatttcagtgtagtgtttataagaagtctactttaaaaatatatttttaaaaatgattgtaggatcctgtttttttgttttgttttgttttttgctttttgtttttttttttattctaacatttcctatgttcccacaatattaagagaccatttcacatcacagtctcactgctggagacttttactataatatatatttatctaaataaggttttatttatttgtagctgcataaataaggtttctacttagaaggaagcctcttgagagcctatatttgttttttgtacattttaaacttctgttctttaacaccagaaagcaaaagaatgaatagcaggtgaacaactctaaaaaagtagagataacaagtagaaggaaaataatgtttatgagaagaaaagtggtcttgttattgagggagccaagctgctaaacagagtgggaagagaacatttgttcagtctctacttgctggggcaataaagccttctatctgcccctgttctgtgtaaaatcctgttaatattagatattttaaatttatgatgataaaagaaatgtgcaccttttgtgggaaattcgaaaagaacgaggaaaaataaagaagggcaaccacctctaacaccaccacccagaaataatgacagctttcaagtgtgtttctttctaatcttttctgtgtaatttaacataattgaaattatacggaataaacagtttcttggcctgctattgttttcatggactacaattttgtactctcattttgagtaattataatgtgccaggcactgtgttaaacattttacaaatattaatattatctcttctcagcactatgagggtgggtatagttataccttgagcttatatttcagggaatgtctacaaatgagtctactgctttaagtaggcttcactgtatgaagaaaatgcagacagcagaaaagaaagctagacgtttttcatggatgcttctttctttctttttcttttttttaggttttattttggagggaaggaagaagaacctgtcttctttaaaaaatgaaatatttttaaccgaaatgttatctagtgtttagtgtgtcaacaagttctaaattgtggaaaagtcttatcagaagaaaggctgctttgaaaacgatatggaaatatttgttgggtgttcactccttcaacgtctaaatgaaatacactggggagtaactgaattttacagtatttagatagctacatagtgagcaatcaaaacattctttaagtatttaataagaggttaagatcggcccgcctaaagcttatataatagaactgagtcagtgatgatgagcattttttcatgtgtctgttggctgcataaatgtcttcttttgagaaatgtctgttcatatccttcgcccactttttgatggggttgtttgttttttccttgtaaatttgtttgagttctttgtagattgtggatattagccctttgtcagatgagtagattgcaaaaattttctcccgttctctaggttgcctgttcactctgatagtagtttcttttgctgtgcagaagctctttagtttaattagatcccatttgtcaattttggcttttgttgccattgcttttggtgttttagacatgaagtccttgcccatgcctatgtcctgaatggtattgcctaggttttcttctagggtttttatggttttaggtctaacatttaagtctttaatccatcttgaattaatttttgtgtaaggcaatcagagaaatgcaaatcaaaaccacagtgaaatatcatctcacaccagttagaatggcaatcattaaaaagtcaggaaacaacaggtgctggagaggatgtggagaaataggaacacttttacactgttgatgtgattgtaaactagttcaaccattgtggaagttggtgtggtgattcctcagggatctagaactagaaataccatttgacccagccatcccattactgggtatatacccaaaggaatataaatcattctgctataaagacacatgcacagatatgtttattgcggtactattcacaatagcaaagacttggaaccaacccaaatgtccaacaatgatagactggattgagaaaatgtggcacatttacatcatggaatactatgcagccataaaaaatgatgagttcatgtcctttgtagggacatggatgaagctggaaaccatcattctcagcagactaccgcaaggacaaaaaaccaaacactgcatgttctcactcacaggtgggaattgaacaatgagaacacttggaccaggaaggggaacatcacacactggggcctgttgtggggtggggggagcggggagggatagcattaagagatatacctaatgtaaatgacgagttaatgggtgtagcacaccaacatggcacatgtatacatatgtaacaaacctgcacattgtgcacatgtaccctagaacttaaagtataataaaatatatatacatatgtataaagtaatagaaatgagtccaggaatcagtaacttggatactttgttagctgttcgagaccctgggccaggccaacacttcctaaaggtgccagagcacacagagagcatagagattgcactgattgcaaacctatccaagggccccagctcctctgctaacacccaaggcctctccacctgtttttctccgagttgctcgtcaccctgtcctttaccttctagattccccagggctcctggtctccttggaattaagactttgagattttgttgtaagagtttccaaacaattcttcacaatatctcttgggtttgtccttgtttatccaggcctttgttactcccacagcctccttgccagcctttttgatgcatcctttgctgctcactgccttaatacccatgccatctccaggtctgtatttctaaaacatttctcttgtgtcattcctctgctccaagaaggccttgaatgtcaagcctgtttttcagcttgtcttttgaggtcttctgtaatctggctgtacacaaccttacacttttatttccggctccaacgtaaagcttcctatgaagtccagtggtgtgaatttcaacttgtataccttgattgtatttttcacaggtctagaaaatccttactttacaatttatttaaatctttctaatcttaagttctattttttctatgaagtattccctgattcagtctacctaggtcttttctttctctgtacttctcttacaggcagtatcataaagatgaagtcatgtttttatggaagccatttttccccaacgagattatagctgtgatggtaaagctggtacccttcaaaagcttattcctttcctttccctttccctttcttctgttttctcttttcttttttcttttcttttcttttctacctctgtcctcttccccatcacccccttgatattaacatcattgcactatatatccttttcctcccatcatctttcattttctcctgactcatcaatataccagcataacataggatgtatcattttttagtcgacaacaaaaagattttatttttttcttcatagcattgcataatatattttcatgtaatacagttttgaatcctacagaaaaatatgaagaaataaaagtacctgaagagccatcactgtgagtagtccaccatcaaaattttgataactgtctttttaggcatctctattcacacgcatgtgtgtgtgctcacacatcgacatgagtaccatactgctttctcatgaatatcttttttaaaatgcagattttttttggagaaggaagtttacctgccctcttctcttccccctctccccaccatctcttaacgcatttatgttaacaagctgtgtgtttttgcattcatcaaacccattttattatatgcaaatacattatatataatggtataaatggggagggggagtgtgttttgccaaaatgggatcaccttatatacagttatttggatcttgcctttttttttatttatttataattatatgttaagaaaatccttctaagaaaacattttatatccaactccaggagaaatattaaaaagggaaaaatttgattggatgagcagatattaaatatatatatatcaataagattttctctgtaccattaaataactaactttaaaaaataaagaataattgtcattcatagtagtgtcaaaaatctttaaaatgcctaagaataaactaaaagggaaagttaccagatttctagaatcctgattttcttaaaaactggataaaataatgttaaaatttatatagaaaaattaatatttgaaaagaaccaagaagttcatgaaaaagattatctacttcttaaatttaaataaaaacatatattgcctgttttcttggcactactaaattattctacaacatgacttaatgactgcagagtatttcaacatcggaatgtactctcatttattttactagtctacttttgaaatttaggttgtttgtttgttttcaacatatatatttttgctatataaatatgctgtagggaatagccttatggacaaattcttatatacaaccctggttgtttttataaaataaaaacctagaagtgaaattgctaggtgaattttcacatttttaaaacttttgccacaggagtgctcattattgcactttgctaataatagagtttgttaatctaatttttttttttttaagagtcaggatcttgctttgttgcccaggctggaatatagtataagcatgatcatagctcactgtaacctcagactcctgggctgaagcaatccttccccttcagcctcccaagtagctaggactacaggtgcacatgaccatgcctggctaatttttttcatgtaattttgtagagatggggtctcactgtattgtccaggctggtcttgaactcctggcctcaagcgattctcccatacgcatatatatcctcccacatatgtgtgtgtgtgtgtgtgtgtgtgtaaaatgcagtgtttttaggaaaaatataaagaggtcaacttactagctttcaaaactaagaagaaaagaagaacactcccttgaggtttaaggcattttgacatgtaaattgtacaccaatagataggcacattacatgtaataaccagaccatagactcttaattttgttgaacatgcccaaaagctctgtgtctctttatctcagtctgcttcagtcactagggcaatgaggacattaactatcacatcttgaagtaacttacaaacaacactttgacatttggagcattctataccagaaatctcttaaattacaatttgtttcttaggtctagcatgagtaacaccatcaaagtgtatttctttggcttctgctataatcaacaataatagtaataataactaacatttaatatatacaacaaatgctgtgtcaggcactgtgcactgtaactgaggtggtatatttacttttttttttttctttttttaactgatgaggaaacttacccgtaagagcatttaactaatttgccaagccagcaagtgaggatagagccctggagttggtcccattaccactataatcacttcctctagtcattctttccttactccaaagtttacttcatcatctctagccatttctagatacctttattcttttcttctcttgatgtcttcattttatctgtctcacttccatgacttcttcttcttcttcttctttttttttttggatgaggtctcactctgttgcccaggctggagtgcaatggtgccatcatagctcactgcaacctctgcctccgaggctccagcgatcctcccacctcagcctccagagtagctgggactatgggtgtgtgccaccatgcctggctatttttttgtgtttttttttttttcttttgtagagacaggtttcaccacgttggccagcctggtcttaaactcctgagctcaagcaatctgcctgccttgggctcccaaaatgctgagattacaaacgtgagccaccgtgtccggccaatttcttgtatggataccaaactgtgtcttatcctgcctcttttagttctatgtcttatcacccattagttttacaggtagccatatttatatttaacctacgcaaacttgatcttcatctgcagaaaaagggaatcaaatctactgctcatttcattggaaagaatatttatttatcttgatgtttaatcgagctgtgggctctgccttttaaatactgattagttctccaatagaacagttcttttgggaactgggaagcttttattttagacatttagggtatagttttgaattaaaggctatttttccataagcggttctgaaaggttaagttttgtacgaaagaatgggctctagaaatttactttggaacttagatcacttcattgggaatgcctaagtgaatctttgacataagttgtccaggtgtctttgctttattctttggaatgaaaaaatgtatgggtcaaacagaacccatctgtttggaatatctttagtatccagactctgacctccatgtttttggttgtgagaatgtcagcatagtacctggcttctagaaaatgctctataaatataaattgcctgggtgaataactgaattaatgagtgacttaatgatagagactgagaatgagaagatagaatggttgttctggaagtgattgcttctctccagctaagcctttaactctgggctgtaccatcagtagtccttgcatactgaagtcagacttttctggtcaagaagaaccttttaggttcttgataaaataccttttattcttaattttcctgtaagtacctgaatgtattatcttgaataactccaattcaggtccttagattcctcacgttacttgaaattctttgtttcctctaagagttcactgtatctcacaaatatcctgatataattctgttggtaaatattgatctcactttgctctgagatcaggctgatgtatatgtgtggtaggtaataatccctatttaggctgatacattgttcacatatgcacatattataatacacgcaaacatacagaaatacacactttttccctctgaatttttggaattgaagacatgatactcctttatccttaaatgtttccatgcatgtttcctgaaaacaaggacagtctcttatacaaacatgatgtaattatcaaaaccaggaaattaacattgatacaatactattatctagtctgcagactgtatttgggtttttccagttgttccagtaatggcctttataacaagttaaaatccctgagcatgtgttgcattcacttgtcatgcctcttaatctttagtctggaacaatttattctttgtcccctgcaacttgacattttttatgagtgtaggctttttattttataaaaagctgctcttttgattttctctaatgatttcttattattagattcaggttatgaatttggggaagtaacaccacagaattgatattttgtttttatctgttgttatgtaaaactatgaattcatattgataactacaatttcctttcagcatcacactattcattctgtgattcctcccttccatgtttttagcttccttcttcaacagcaagaagcctggttccattaccctcaataaatttacttatttactcaatcctagatatgaaaaagcaacttcagaattgctaacccatacatctttaaaaaggaatcctgttaactagtattcagtatttgtttagggtgctttttggttttagtctgaggacatatagtgtaaatactatctttaaataaagttacttgggttagtttttcgttctctcttctacccccaactctgtccgttggaagcataggcaagacaacctggggcttgtgattgatcatcagaagtttggtggggggcggttggtcttggggactgagccctcaaactatgggatctgacactatctccaggtagagtcagaattaaactgaagtagtggacacccagctggtgtctactaaagaaccgattgcttgcttggtgtgtggggggaaaatccccacacatttggtcacagaagtcttcagtgttgatggtggtgtgaaaacagaagaaaaacagtttgtgtttttccactcagtgtattataataatcccccttaacaatttaggaataaactgatattcctgacaagcaaaaataacttatctaaacatgtaatcatttgggctttagttttcacattcataaaaatgaaggcattggtctaggtgatctgtaatgtgctttccatccttaatatttttgaaaaaatatctgtgacatgttcagtatagctaattttgattaaataaacatattttaaacctatttttagaaccagttttggggagaatttttgcctttagtgatagagaatttttcccttaatgtaggtagtaaatgttataagattatattgtttatctacaaatcagcaagtataaccagggttctgaattctcatgtcatatgtaaatcagtaacctttcagagattaaatgagagcaatcatgtgatagcagcagcaaaagatcaatatgcaatgctagatatagaaatcttcttgtatctttaatatatatcttaattttagtccttgtattactgatcttgtgccatgtaacaaattaactcaaaacatagtgattaaaaacaacattaatatgtatgagcactcatagtttctggctgggtacttctagcattggatctctcatgaggtttcagttagatataggttaatgaaacacgcatctgacagcttgactgagcatggaagatcttctgtgttggtcactcgtaggctggcatgttgatgcttattcttaatgctggctctacacagtgagcaaagagacctagtgttagaagtcacaaaacgtgagttttatattccattggtcacactgaccaactccaattcaatatggaagaaaaactacccaagagcatgagcatcactgggagtcatcttggaggctgggttttagtgtctgtccttgtttttgttttcagtagaagaaatgacttttttagtgcccttgaaataattgctaaaatggtcctcaatgagatataatccttttgcacagataatggtacatttttttcttactagaaactagagcttacttactatatttacttactagtcctagagctcagtgttatttgctaaagaaaagttttcttttgttttgtttttgagacagggtctcgctttgtcacccaggttggagtgtagtggcaagatcttgtctcactgtaaactctgcctcccaggctcaagtgatcctcccacctcagcctcccaagtagcagggatgccaccatgcctggctaattttttgtatttttagtagagatgggtttttctcatgttggtcaggctggtctctaactcctgagctcaggtgatccacccgcctcggcctcccaaagtgctgggattacaggtgtgagccaccacaccaggacttaaagaaatatttgtggggctaggtgcagtggctcatgcctgtagttccagcactttgggaggctgagacaggcggattgcctgagctcaggagtttgagaccaacctgggcaacacggtgaaaccctgtctctactaaaatacaaaaaattagccaggcgtggtgatgtgtgcctgtagtcccagctactcgggaggctgaggcagagaatatcttgaatccgggaggcagaggttgcagtgagccgagatcacaccaccacactccagccttggcgacagaccaagactccgtctcaaaaataaataaataaataaaaataataaataaaataagaaatatttacggccaggcgcggtggctcacacctgtaatcccaacactttgggaagctgaggcgggtggatcacctgaggtcaggagttcgagaccagcctggccaacatggcgaacatggtgaaaccctgtctctactaaaattacaaaaaattagcccaccatggtagcagatgcctataatcccagctactcaggaagctgaggcaggagaattgcttgaacctgggaggcagaggttgcagtgagctgaggttgtgccattgcactccagcctggacaacaagagtgaaactccgtctcaaaaaaaaaaaaaacaaaggaagaaggaaatatttattgggttgggtggagtaggctcagagccatgaatgttccaaatgatagtaaaattggatctcagcttcctattttatggcaaacgaggtgattactggtaaaataaatgaataaataaaaaataataaaaataaagcctttaaagagaaaatgtaatagttctttccaatgatctttagattttttaccataatcatcagaattatctttgatggtttctaaaatgtgttgtattaatgtataatgtaaactttaataaatgtgcttttaaatgccagttgctgacattaaaatatatctataatgaagttcaaagataaatggaactttctgaaaactcctttgcaagttaatttagatataggaggtaggatttgaaaacaggatcacattataaactcaatagtcctagaattattatttaatatataaaagatatcaaaatgcatttgtaaacatttgaaagataacagaattggaaaattattgttcatttaatacaaaaatgctttcagaatctcttagctttttttgtcatttactagaaaaattgctggtttctgtattttttctttttcttcttctaactttttaatttattatacatcattgtactaacagtaaaggaaatttaaatgatgaaaataaaatctgccatcttatcaagttcaatgtgactgtaaccttttagttctttgtgtgtgtgtgtgtgtgtgtgtgtgtgtgtgtgtgtttggttggcttttattgatgtatataaaaagattacagacagcaagagaagataatcagaggccttttcgttcttatcaaattaagttgctttatagttgtatttttcttttatattttaatatgcatttgtaattgatagaggaaagaatttgtctttcctctgtctcctctaattttgtgccaaggaaaatctggcacagaattaatcaaatttttgcctaatttttatcatgatataattaaaaaattgagtatatgatactcaattttatctttattgtattttattagcaagggcttatttattaatgtatactaggttttggagaatgactttcaagtataatctgtttatttattcacaattggtttaccagtttcctgatgtttctgtccctttgcatttttggtcacatacctttgaccctttttggcctttccagtagaggccaactatagatggagaaaaaattcaatgcatcatttgccttccagtttaatcagtagagtaggcaatacgtgtacattttttgtttgttttttaaaagtctctctgccatgacatttccaatcccctagctccctctttaccactgttatcagtctcagaattatacttccaaagataatctgtgcacaaacaagcatgtgtaggcatatctgtttttcttgtacacagttagttgcatatcatacatactcttttgcacctcactttttttacttataaatctgactcattttttaaggttgtatagtataccatcatatctctttggtatcatttctttaaccaaacattattgctggacatttaagttatgttttgattgttagtgaacaatgcagtatgtatatccttttaaattcttagtgtatatatgtgagattatctgtgagatgaattctgaaaaacgtaatttctagtcaaagaacagtgcacatttaaaattttgttagattctatgaaattgcctaagaagttgaaccaatttatatttccaccaataacacataggcatattcttttgccaacacctgccaattgaagatatttcaagggccagcatttgatgtcatacaagagacatcaaatataccacttagtgaaaaatactttgttctatcccaaagaaaactattgataacccctctaagcctccaccctcctaacttttttttctttcatgggttattcatggctagtgtcctcttccagcaagcttaagcccccaaatcagtccctttcttttgtcctccacatcacttatgcgtgatcccaattggatttcacctctgcatttagtacctcctttccatttccactgccactgccctaattctggcctacttataacatctttggattattacaaagccaactaatcttccgttaaaaaaattctcccttctgtaattccttctcccaagtgctgtagttatcttcacaagatctgagtatgtaactgcattactttttaactatttcttacccacgcctagagttttcacgttgaccttcaagacacaatggcctggccttacctttccttttcaactttattacccactactctctctcatgtcttccttgcatgcacacatagctgcaattattctggatttttcatcatttcctggatagccctccattttcctgcgtaatccctttgcttttgttatttgtaacatatgcccgtaatattcccttttgcatttctgctaggtggaattctactttttaaaacttaggtcatatacgactccttccatgacatcctgtttccctggccaaaagtagttttttctatatgcgtcataataatgtattttgagatattgctagtatcaaacatatttcattatgtattttagttgtacatgtctttttccctcaggagatcacaatcactttgagagcagtggcaatatcatatccattttcatatacttctctatcccacacataatgtatgtttctagtaaactgaattataaatcctgtatttaaaattttttattttatagtgattttagagttttcctctttgttacagtttttagaatgctttaaaagatttaaaagtttagtatgtgcagagaagaatgtctgaattaaaacctgaaatatctttcagattcagtgccagaaaggcagtgtgatgccagaggaagaataaggtcttggaagtcatgtatatttagacaagagtcccagtgccatgaccactttttagctatgattatataaaaacccgaacctttttccttgtctttaaaatgaggtgactggagtaggtcagtgtttcttaacacatttctgttataaagcatatgccagattatatgtatgcacatgttcccatcagcatacttagattttgatagaagataaaagaattaaaatgttttaattttaattggattttgtagttaccacaactatttctgctatacttggtatagcagtaagtggccgacttcagaatgcagcacaggaaagatagattgctagttatatgtgagcctctctcttgcttcccagtgagctgcagctactttctcagaatgcaagtgggttagtgaggttgttataggaataactttgaatgtaatctaagttatgcagacattaatcaaaacagtcatagtattttaattatttataggaataaattacttcttacagttgatcttggctcctgatcttgttacattgttatgagctgctgaacaagaagatcttgaaattttcgtccaactttccaattctgattgtttattctcctttccaaagtatagttgggaataagaagacactgaaagttttcagcagttctttttgacctgggcttatggtaacgtaataggggaaaaaatgctttcagttaaagtaattggacatctaattagcatttcctattgaaggttaaatattaaatatttttcccagcaccatttattgagaagacaattcttttcccaatgtgtgtttttagtgcctttgtcaaaaattagttggctataaatatgtggatttatttctgggttctctattctcttgcattggtctgggtctgtttttgtgtcagtaccatgctgtcttggttactacaactatattttaagtaaggtagcatgatgcctcaagctttgttctttctgctcagaattgctttaggtatttgaggtctttttttttttttttttttttttcttttcttttgagacacagtcttgccgtatcacccaggctggagtgcagtctctcaatcttggctcactgcaacctctgcctcccgggtttgagtgattctcatgccccagcctcaccagtagctgggattacaggcatgcgcgccacacccagctaattttttgtatttttagtatagatggggtttcactatgttggccaggctggtctcaaactcctggcctcaaatgatccacccaccttggcctcccaaagtgctgtgcttacaggtgtgagccaccacgcccagctatttgagatcttttggggttctatacaaatttgaggattgtttttgtctaattttgtgaaaaatgtcattagtattttgagggggatcacactgaatctgtagattgctttgggtaagatggtcattttaatattttttagtctgtcaattatgaatatgggctgccttttcatttttttgtgttctcttcaatttctttcaccagtgttttatagtttccattgttgagatttttttcacctcctttgttaagtttattcctaggtattttattttattttatagctactgtaaatgggattgctttcttgatttctttttcagctagtttgttattggtgtagagaaacactcctgagtttcgtatgttgattttgtatactgcaactttactgagtttgtctattcattctaagaggttttttgatggagtatttaggtttttctatatgttaaattatgtcttttgcaaacagggacaatttgactttctccttttcgatttggatgccttttatttctttcttttgcctgattgctctggctaggacttccggtactaaattgaataaaagtggtgaatgtgagcatctttgtcttgttctggttcttagagggagaacattcaactttttcaccataaggtatgatgttggctgtggatttgtcagatatggcctttattttgcttaggtacattccttctatactgaattcattgacagtttttactataaagggatgttgaattttatcaaatgctttttctgcatctgttgagatgatctttttttgttatttattctgttgatatgaggtgtcatgtttattgatttgcatatgttgaaccattcttgcatccatggaacaaatcccagttgatcatgatgcataacctttttgatgtgctgctggatttaatttgttagtgttttattgaggatttttacatctgtgtttatcaggactattggcctgtagttttctcttttggttgtgtccttgtctggttttggtatcagggtaatgctggacttatagaatgagttttaaagaattcccttcccttcaatttcttggagtagtttcagaagaattggtgttagttcattgttaaaagtttggtagaattcagcagtggaggctaggtgcggtggctcatgcctgtaatcccagcactttgggagggtgaggcaggcggatcacttgaggtcaggagttcgagaccagcctggccaatatggtgaaatcccgtctctactaaaaaaacaacaacaaaatacaaaaaaattagctggccatggtgacaggcacctgtaatcctagctactcaggaggctgagacatgagaatcacttgaacctagggggcagaggttgcagttagctgagattgtaccactgcactccagcctgccagcctgggcaagagtgagactctgtgacaaaaaaaaaaaaaaaaagaaaaaaaaaaaagaattcagccttgaagccatctggtcctgggcttttctttgtagggagactttgtattgctgattcaattttattactcgtcattggtctgttcatgctttccatttctttctggttcaatcttggtagatcgtatgtgcccagaagttgatccatttcctctaggtttttaatttgttagtatgtagttgttcatgattgtctctaataatcatttacatttcttctgtattagttgtaatgtctccattttttattttattttggggggttttctttctctcttttttggctagctaaatggtttgttgattttgtttatctttttgaaaatgcaactttccatcttggtcttttggttttttaagtctctattttgtttatttttgctctaatctttattatttctttctaatatgatttacatatttattcttggccaaatctcatgttgaattgtaatccccagtgttggaggtggggcccactggaaggtgattggataatgggggtgaatttctcatgaatggtttagtttcatcactttgttggtgttctcatgacagtgagtgaatttttgggagatctggtcatttaaaagtgtatgggggctgggcgcagtggctcacacctgtaatcccagcactttgggaggccgaagcgggcggaaatcatgaggtcaagagattgagaccatcctggccaacatggtgaaaccctgtctctactaaaaatacaaaaattagctgggtgtggtgatacacgcctgtggtcccagctactcaggaggctgaggcaggagaatcacttgaacccaggaggcggaggttgcagtgagccaagattgtgccacagcactccagcctggcgacagaatgagactccatctcaaaaagataaataaataaataaaaaggtgtcaggcacctcctcttgtaggaagcatatagtcggatcttgttttattatacattccaccagttcatatcttttagatggggaatttaatccttttacattcaaggttattatttacaggtgagaacttactcttgttattttgttatttgttttctgctgttttatatgtcctttttgtctttttcctttttcttaattgtttatcttgcagtttggtggttttttgaagtgatatgttttgattccttttcttttctcatttgtgtatctgcactgtcagtgttttatgcttccccatgttttcatgatggtagttatcattcttttgcttacagatgtaggactcccttaatcatttcttgtaatgccagcctagtggtgatgaattctctcagtgtttgctttcttaggaaagactttatttcttccttatttctatagaatagctttgatcggtatagtattcatggctagcaatttttttctttcagtgctgtgaacatgtgattttattctctcttggcctgaaggtttctactgaggagtctcttcttagtctaatggggattccctaatatgtgacctgatgcttttcctatgctgttttacaattctttctttgtctttgacttttgacagtttgactataatgtgcctcggagaggaccttattggtttgaaattttctagatttttgagcttcctggatttagatgtctatatctctcccaagacttgggtagttctcagctattattttattaaatagtttttataggcctttttccttgttttctttttctgggattctcatagtattaatatttgttcacttaatggtgtcccaaagtcttgtaggctttctttgttcttttttatttccttttcttttcttcctgttttttctcttttattcttttgtctgagttatttcaaaaacttgttttgaaagtcagggattcttttttctgctttatctaatctgttattgagatttttctgttctatttttatttcatccactgaattcttcagctccaagttttctgtttggttctctttttattatgtctatccctgcattgaatttctcattgagataatgattttcttctattttatcgaattgtctatttgtattattttgtatcttgctgagtttaagatttttgctttgatttccttttttggcaatttataaattttcattttggtgggtaaattactggggaattgtgtctcattggtggtgtcatgtttcattgcttttcatcttggatccctgtgttgatatctgtgcatctggtggaacagttgcctattccaattttgtagaggggctttcgttggggaagactttcacctgcagatgtgttttagggtctcagttgggtggggtatgttgctttgttttgaaggggtagcatagtgtagtctccatgcagtttcttcagctgtagtcagtgttggcaaatgcctgcaagtgtctcagtggcttaagctgcagagttgtgtgaggctggcctacctactcagggtctcctcccttgagagtggggcacttggttggttaatgctccagggaagtgtggggctggtcagctgacagcttggctcaggtgctactcccctggggccatgtgctggcctggtctgtgctcagggaaaacatggaaatggttggcctacctcttggcttgggcactgcttccctaggggtgaggtgtcaggctagtccattctccaagggagtgcagggctgattggccatcggaatggcttggatgctgctcgcctaggggtgggataccagggtggtccgcactccaggaaagcagggagctagctggctggtggttctgcttggatgccagtcccctgtgggcagggcacttggaccaaaggtgttcttgtggatttaggttttgagtggctgggattgaggtgctgcaacccttgggatggggaatatggagcaccctgggcagcttgttttcaggagtttggaagctgtatcatctcagcttggtacacacttaaaatttaggttttgtgttttggttatgtttagacataatgcctaatactatatatgatatgggaactctcatatacttctggttgggaatataaaatgatacaactttactggaatgtaatttggtgttataatatcagaagctttacattgtctcatatatcttcttttacttcataattatttgattagaaaatatgtcttgagggaataattatatgtatataaatatttatctgcaaatatatttattgcattatttatgattaataatctaaaacaacccaaatattcaacagtgattaaatattattttatatttatacagtatagtcttatgaagtcattaaattatttacaaaacattttaatgatgttggaaaacacttacgttgtaatagtaattaaataaggcaggataataaaactgtaaagaacatgatttcatatatttgagagagaagagagaaaatttgaaagagtgtgtttgagtgtaatgggggatttggtaaaatttaaaaaaaagattctgatttagttttcatttctattttctgttttaaaatttttttcctctaaagtccatgtacaattttcataataagaaaagctaatgcatcctatttttaaactaacattgttagaattagggagaagatggttcatttataggaaaggatatcatgtttgcaagaaaatttgtaatggcatgaggaaacataataaagggagaaatctacgaaagtattaataatgcattgacaaaagtatagaagggaatacagaaacatattagtctttcttctggttctgtaatatgataaaaacatttataaagctgggcatgctggtatacacctatagtctcaactacttgggagagtgaggcaggaggatttcttgtgcccaggagtttgagtctagcctgggcaatgcaatgagaccttatctctaaaatataaaacaataaaaatataaaatttaaaaaatttttctgcttttcaatttttctggaaagaaatatatcttaattaaaggaaaagaatttaaaagcaggctgatactcgagcattttgaggtcatatttgatgtgaaatgacattcaaaatttcagggagttaatttttttctagcagcacattgaatgatgctaaaaggaaacaaaatgggaaaaaatggaaagagcattagactgttgcacaacgttgatttagtatattttgtttattcatatggaagggcaaactcattcagcaaactttgtaagagtaccttgtaggtgcagagaaaagtactgctcacttatggaatgaagtgggaaaaaagtaaaaacatttttacttttccatttttctggaaagaaatacataatgttttggctggtcatggtggctcatgcctgtaatcccagcactttgggaggccgaggtgggcagatcacctgaggtcaggagtttgagagcagcctggccaacatggtgaaaccccattttctactaaaaatataaaaattagccaggcgtggtggcaggcgcctgtaatcccagctacttaggaggctgaggcagcagaattgcttgaacccaagaggtggaggttgcagtgagccgagattgtgccactgcactccaacctgggcaacagagcaagactccatctcggaaaaaaaaaaacaaaaaaaaaaaaacaggaaaagaaaaagaaatacatcatgttttaattaaaggaaaagtattgaaaagcacactgatactagagaattttgaagtcacatttgattatgcacaaagaaggcatgatccttgttctcaaggttcgtactattcagtatggaagataaaaggtattcacaaagaactaataaagttaacgtatttaaagtgacatatttgggtggccaaggattgcttgaggccaagagtttgagaccgtcatgggcaacacagcaagaccccatctttacaaaaaatacaaaaaaattagccaggcttggtggtatgcacctacagtcctagctactagggaggctgaggcaggagaatccctcgaacccaggaggcagaggttgcggtgagtcatgatcatgccactgcactgcagtctgtctgacagagcgagactccatctcaaaaaaaaaaaaaaaaaaaaaaaaaaaagaaggacactatggaaatagtggtatttgaatgggctcttagagaatgggtctgatttcaacagtttttcatgaaaaggatgtgcatttcaggtagaggaaagatatgagcagagaaacaaaggtgacaaggtatgggagcaatttttagatcaatgaaaactttttttaaaaccagcttttaaataatactttcaatgtacaatttagtggttttttagtatatttaaagagttgtgcaaccatcaccaatacctaattgtagaatatcttcatcactttaaaaagaactctgtaccattaatagtcactctgcatttcttcttctctctcacccctggcaaccacatccattttctttccctgtggatttgcctattcttgacatttcatagaactctatcatacaaaatgtggccttttgtgactagcctcttttctctttgtagaatgttcactcatgttttagtatttatcagcactttatttttatgacttcactgccaaataatattccacaatatggatataccacatccatttgtttcccttttcatcaattgatagaaatttggggtgtttcaactttttggctgttatgaataatgctgctctggatatttgtttaaaagttttatatggacatgttttcaattctcttgggtgtatagctgggtgtttacttcctaggtcatatgttaattttttgtttaaatttttgaggaactgttaaattggtttccagagtagtggtaacattttatatcctcaccagcaatgcatgaagattccgattcctccacatacacaccaatacttattattgtatatcttccatggttacatgacttggttttctagtgtaccttggagttggagaatggaagatgggaatagagaaaattaaaatgccatagagctctctattcttagcaagattcactcatttttcttgaataaacacttctcgattattgcaagtctttggttaatttccagagctccagaagaattgattctgacaattttgctggtgttcttgttgcttttaggaaacagcagattttctaagattcttacactaccattctaaagttgctttagtattcttctaaagttgaatactcctttttgttcgtttttatgccaaaggtaggttgatgccagacattgatgagaattgctctttctttttaggctactgagcaggggtatgacctgctatgccttgatcagagctatggtttataaattggagcaaggaataaaggcctctgtatatttagaggtgctttggtttttgttgttggtttttttcctttccaacttttattttaggttccagatatacatgtgcaggtttgttacatgggtaaattgtgtgtgtgtcacaggggttttgtgtacaaataattgtgtcacctgagtaatcagcataatacccaattaagtagtttttaaaatcctcaccatcctcccactctccacccttaagtaggtcccagtgtctgttgttcccgtttttgagtccatgtgtactgaatatttagcccccacttataagtgagaacatgcagaaccaaatactgtttttctgcattatatcttaggattatgaccaccagctccatccatgttcctgcaaaatgacatgatctcacttttttaatagctgcatagtattccatggtatgtatgtaccacattttctttgtctaatctaccattgctgtgcatctgggttgattccatgtctttgctattgtgaatagtgctgtgatgaacatatgcatgcatgtgtctttatggtagaatgatttattaatacatttctttgggtatataccagtaatgggattgctgggtcaaaaggtaattctatgttaaattctttgagaagtctccaaactttctacagtggctgaactaatttacattctcaccagcagtgtacaagcattccctttcctctgtaacctcaccagcatgttattttttgagtttttaataatggccaatctgactgatgtgaaatggtatttcactgtggttttgatttgcatttccctaatggttagtgttattgagcatttttttcatgtgcttgttggccatgtgtatgttttttgagaagtgtctgttcatgtactttgcccgttttttaatgaagtttctcatttttggcttgttgatttgagtttcttatatattctggatattagaccttggttggatgcatagtttgcaaatattttctcccattctatagggtgtctgtttactctgtttacagtttcttgccattcagaagctctttagtttaattaggtcttacttgtcgatttttgtttttgttgcagctgcttttggagtctttgtcttgaagtctttgcatgggctgatatccagaatggtatttcctagattttcttttagggtctttatacttttaggttttacatttaagtctttaatccatcttgagttgattttggtacacagtgaaggtaaggatccagtttcaatcatttgcatatggctagccagttatccccaaaacatttattgaatagggagtcctttccccattgcttgtttttattgactctgttgaagatcagctagttgtaggtgtgtggatttatttctggattctctaacatgttccatttgcctgtgtgtctgtttttgtaacagtaccatgctgttttagttactgtagccttgtagtatagtttgaagtcaggtagtgtgatgcctccagctttgttctttttgcttaggattgctttggctattcaggctcttttttggttccaattgaattttagtgcttttttttttttctaattatgtgaaacatgtcattggtagtttgataggaacagcattgaatctgtgtattgcttttggcaatatggccattttaacaatattgattcttcttatcaatgaggatggaatgtttttccatttgtttgtgtcatctctgatttctcttagcagtgttgtgtaattcttgttgagagatctttcacctccatgattaggtgtattcctaagtattttggtttttttgtggctgttgtgaatgggattgctttcttgatttggctctcagcttggatattgttgatgtatggaaatgacattgattttgtatgctgaaactttgccgaagttatttatcagatctaggagcctttgggcagagactggagtttcccaggtatagtatcatattgtctatgaagagagatagtttgacttcctttcttcctatgtggatgccttttatttctgtatcttgcctaattgctttaactaggactccctgtagtgtactgaataggagcagtgagagtgagcatccttgtcttgttctggttctcagggggaatgcttctagtttttgccccttcatatgatgttggatgtggatttgttgtaaatggtgcttcttattttgaagtatatacctttgatgcctagtttgtttttagcacaaaaggatgttgagttttatataaagcctttcttgcggctattgagataatcacgtggcttttgcttttagttctctttatatgattaatcacatttattgatttgtgtatgttaaaccaaccttgcatcccaggaataaagcctacttgattgtgatggattagctttttgagggatgtgctgctggattgagtttactagtattttgttgaggattttttacatctatgttcatcaggaatattggcctgaagatttcttttttcatttcatctcttccaggtattggtattaggatgatgctggcttcatagaatgagtaagggaggagtctcttctccccagttttctggataggtttaataggataggtagaactcttcttcatctggtaggattctgctgtgaatctacctggtccagggctttttctggttgatagtttttgtattaccgattcaattttggaactcattattgatctgttcagggattcaatttctttctgcttcaatcttgggatgttgtatgtttccaggaatttacccatttcttctaggttttctagattttatatatatatataattatatatatttatataaatatataaatatatataaatatataatatataaaatataaaaaatatataaaatatatatataattatatatatattttatatatatttttttctaggttttatatatatattttctaggtttctaggttttctaggttttatatatatatataaaataaactcctatatatataatgcttaataaactgtatatataggagtttattaagcattatatatatataggagtttattaagtattaacttacattatcacaaggtcccgcaataggctgtctgcaagctgaggagcaaggagagtgagtccaagtcccaaaactgaagaacttgaagtccactgtttgagggcaggaagcatccagcatgggagaaagatgtagactgggaggctaggctcatctcgtcacttcatgttttctgctttacattcgctggcagctgattaaatggtgcccatgcgattaagagtgggtctgccttccccagccctctgactcagatgttaatctcctttgacaacaccctcacagacacatccaggatcaatattgcatccttcaatccaatcaagttgacactcagtattaaccatcacaggtactataaactttcctcttaatactgctttagctctgtcccagagaatctgctatgttgtatcttgttttcattagtttcaaataatttcttgattcctgccttaatttcattgtttacccttaattcattcaggagcagattgtttaatttccatttaattgtatggttctgagagattttcttggtattggtttctgtttttattgtgctgtggtctgagaatgtggttggtataatttcggtttttaaaaatttgttgagaattgctttgtgttctagtgtgtggtcaattttacagtatgtgccatgtgcagatcagaaggatgtatatgctgtttttgttgggtgcagtgttctttagatgtatgtttagtgtatttggtcaactgtcaagtttaagtctccaatattctgcctcgatggtttgtccgatactgtcagtggggtgttggaagtttcccactattatcatgtggttatctatgtcttttcgtaagtctctaggaattcatgttatgaatctaggtgctccagtgttgggtgcatatatatttaggattgttaagacttcttgttgatttgaaccctttatgattatgtaattcccttctttgtcctttttgatcattgttggtttaaagtcagttttgtctgaaataagaatagcaacccctgctcttttttattttatgtttgcttgttggatctttctccatccctttactctgagcctttactttcccactgtatgtgagatgggtctgttgaagacattatagcgttaggtcttgcttatttattcaacttgccactttgtgccttttaggtgggatgcttaacctgtttttcttcatggttaatattgatatgtgcagatttgatcctgtcatcatgttgttggctggttgttatgtagacttgtttgtgtatttgctttatactgtcgatggtctttgtatttgagtatatttttgtagtggtcagtaattgtccttcatttctgtagtactcccttaaagatgcaaggacttcttgtaaggcacatcactagataataggtaataaattatcttagcatttgcttgcctgaaaagggtcttatttctcctgaagctagtttggctggatatgaaattcttggtttcaatttattttccttaaggatgctgaatataggcctccatactcttctggcttgtagggtttctgctgaaaagtctactgttagcctgatgtggttccctttgtaagtgacctgacccttctctctaggtgcctttaatattttttctctcacattgatgttggaggatttgacgactgggtgctttggggatggtcatgttgtatagtagctcacggcagttctttgaattttctgaatttgtatgtcaacctctctagtgaggttgggaaaatttttgttgacaatattctcaaatatgtttttcaagttgcttgctctctctttctctctttcagggatgccaataagttgttgatttggtctctttacataattccatatttcacagagactttgttcagttttttaaaattcttttttctttatttttgtctgagttaatttgaagaactagtctttgagctctgagattcttttctcagccttgtctattctgctgttaatacttccctttgtgttatgaaaatcttgtagtgagtttttcagctttatcatctcagtttgtttctttcttaaattgagtgttttgtcttttattctcttgaatcatttgattggattcgtcagattcattggaataggtttcaattttctgttgaatcttgattaatttcattgccatccagattctgaattctacgtctgtcatttcggccacttccttctggttaggaaccattgctggggagatgttgtagtcatttggaggtaagggagacactctggcttttagaattgtcagagttcttgcgttggttctttctcatatgtgtgggctgatgttcctttaactgcgatgtaatttgagtgtagtcagttgacttcatttctggatgtttttagagggccgaggctttgtgcagagtctgtatttgtgcctgaattcttgtccttggttccccagaagcgtatattagcaaagtatttttggtgttgatgtttgggctatgatccagtagatggtgcttaaacataatggcctgtaggtaggttcttgctcagccatgtggctcctctgcatttccttgcatgtgcagctgtgctccctttcagtggtctgagaatgtcagctcctctcacacttgagtgctggctgcagatctgtttggcagtgttgtgctatatactgtagccctggatggagctcaggctttgtgctccctcccaagcttggaaccttggcagtggcgatggcagagagcctttcacttgtttcttgaggctccaccccagagaaacacaaagctgcctgacaatcagaacaatcaacctggggtggggtgggtgccttgtaggcccaagccaggaaggcttgcctggtgacaaacagaggggagtgagagattcacagggaagaaagacaggcctcttccttgtagggtggctgtggcatactggaggtatgagtaaagtactcagggtctttatttctttcccagtccgagggcagcaagggtagtaccactgcagtggtactggcagaggggctttcagttgcctctgggagctccaccccagaaaaacagagctgttgccagtgggaatgttcagctggggttgggatgcctatgctgcagaaccaagccaagggctctgcctggtgaagactagggaggtggaggctgacaaggaagagagactgggctcccctccacatggtggctgcggtgtgctggaggcacaagtcaagcactcatgtctttgttccttcctcagtctgagagcagtaagggcagtaccactgcagtggcagtgacagaggggctggcagctgcctttgggagctgcacccctgggaaatacagagccattgccagtgggaattttcagccagggggtgggatagctgctttgtgggtctgagccaggggcgctgcctggtaaagaggagggggtgagggctcacagggaagggagactgggctcctctctgtatggaggctgtggtctgccggcaaagcaaacaggcaaagccctttgttccttccccagcctagagcaataagggcagtcctgctgcagctgcaatggcaggggggctgtcagttgtctctgggatgtcctctcctgagagatgcagagttgctactgaccgaattgttcaggccaggccgagaggccctgcccactgaggagtaacatgggcagggtttaggggtactttctacagactaatgaaaatcatttcatggggaaatcatggctccatgacacactggatggacctggggttaggaaaggaaatactgaggagagtatcaagctttactattgcttgtttggaattgggcttctatgtgtcagtttcctaactgggatgattttacctctccatccagaaatattctgttggcctagagaaactttttcaatgccttgtcttcacagatggaggagctataagtagagctttctttagtaatcacatctcagtaaccatgtgcagaaatcaattatcttaatatataccttatcaagttaatttttcaagaacaggtaagaatgagtgagcttagaaagtttaattgggaaaagagtgaatataagaaggtgataggatacctccttcaaaaggctaaaagattaacacatggaaagtaaaagaaacttatttaaatttctgtagaagatagaagtaggaccagtggatcaaagttacaggaaggtggatttttagatctatctaaaaaaggaccaagaaattagaactggcttcttctgttcaaatagtaatcagtgtgagtcacttagggaggttgtcaaagaaattcctgattgggagttgtttgaactaacacacccaaggacctttcttacttgaagaatatgtatgatattttacatgtattgaaacagctgtaaagagaaatgactcgccacaatttcttgcttaaagctttagttcatttctatttattacccaaaagtgtaattttcatttaagaatataagaaatgatacatctcagaattcaaggaaatattatatagataggccttaaaaaaggagggaccagtatggttctgagaaactcagctgagcctttcttttaatgctctaccactgagatgtttagcttccagttgacagtctatgtgcctttaaattcaaattctcaaatgagatactctaatttatttagtttaagttataagtctacccttgattcaatcatctgtagccaaaggagtaagggtcatataacagcaacagggttaaaatggtggtagggatgggcttttttctctggatggtggtcagttgctgctctaagtggagagatgaagtaagtcatgggctagatatctcataagatatttattagatttccaaaaatgttaatggtagaagactatgatttagactgtttgttgtcaatttcacacaaccagtatttatcatatggctactatgtgtaaggcaccatgctggatgattgccagaatgtagaatacaagatattgtccctgccccagggtatttacaagcactctgtccagtagactggtcattatttaataaatcatcctgcttaggttttactttggaagggctagctttctgattatgtagaaaggtgccttattaacttttgaaaaagtttcaagttgagtattaaagatgtttgccttttctaagcatacacacatttaatgtttgtgtagaccaagcctaaaagaccatcacaagctcatactccgagaacaaaaccccaatccgttctccccaaacaaacaaaaatatgagttgaatatcttatttgctagcagtatgttacattaaaatttgtgcttggccaggagtggtggctcatacctgtaatcccagcactttgggaggccaaggtgggcggatcacctgagatcaggagtttgagaccaacctgaccaacatggtgaaaccctgtctctactaaaagtagaaaaactagccgggtgtcgtggcgcaagcctgtaatcccagctactggggtggctgaggcaggcgaatcgcttgaacccgggaagtggaggttgcagtgagccaagactgcgccactgcactccatcctgggtgacagtcagactccatctcaaaaatataaaaaataaaaaatgtgtgcttgttcttatatgtacataaggtggaaggtaaacattttaagtgtctgtgagctacctagtattctaggcatgtcatatatgtaacatgcatatgatatgcagatagtgtatgcactattataataatataatccaattatagtctttattttcattatcttaaggatatttatatagttcaattgagtcgctaggaaataaaaaaaagttttttaagggtggggccttgctatgttgtcctggctgttcttgaactctgggcctcaagtcatccttttgcctcagcctcccaagtagctgggactacaggtatgcaccactgtgcctggccaagaatatttctttgtttcctgtttctgtgtttaagctgcatttagtttggcagtgtttgaaaggtatcatttctggtttacattcagctcttgtcctttctaccagctgagtgacttatgaacagaaaattatagagtaaaaataatatgacatatatgttaggctctaagcccttcaccttttttttttccttccaaataaagatgaagcagcttgtctaggtgcaatgccatgttaatatcctgtaaagataattagtagctgacttagcatattgcttggaggtttcctgagagaccaactttagctataatgcaagagatatttgatttctattaatacttgaataagtcattggttttatcaagatcctatatttaattataacttggggctggacacggtggctcatgcccgtagtcccagcactttgggaggccaaagtggaaggactgcttgagcccaagggttccagaccagcctgcgcaaaagagggagcccctgtctctacaaaaaaataaaaaattagttgggtgtgatagcttgtgcctgtagtcccagctattcaggaggttgtggtgggggaattgcttgagcctgggaggttgaggtttcagtgagccatgatggcaccactgcactcccgcctgggcaatagagccaagaccctatctctaaataaataaataaatcctggtctatttaaaaccctggatttgttttaaatagccatctaatttttatgctacaaaagagttaacatactttcttgtttttggaatctctctgaccttagaaccatactaactttgccatggatatttcttggggcctatttttccaaaataatcattctctttttttagagtctactgttcattttaattaaattgtttcccactatgctggtatgatttcaggaaaggagcatttaagtcatatgttcaatcaaaacttctgcaggtaaattataacccacttttcttttttatttcatgtggtcttggcaaatcatgttttaattgtggtcaaaatctgcatagaaacatattgtttcattgatttgcataatattttggggcattttaaaaatatacatcaatccccagagatcttaagctctacttgacagtatttagcatttacttctgcttaaactctgatatatttgagaaagcagaaggtaccacagtataatggtatttttccctttattattagttgtagtatataatattactagcagtattggtaaatattttagaatgtgaatgagcctgcctttcaaatgaaatctaaatctttatgttggtttttattttattactactgcatccagtgttatctgaatatttaaagtatattaaaaacattaaagacaaaaagacaaaagttttttaaagtatatattttttctcactgcataggatattagactacatatgtgccatctattttaaaactaatttcattcatcaccatctgttttcaagaaagatttaaggtggcgtatgtgcgctcttgtacttggtctcacaggctctgtctctctaacatacaaatctcctggaagtcaaaggtcatgtcttttcttctttctcctccatcttttacatctggctaaaattatattctgtatgcatgaaaatgataattacatattacctggtagttatcagatagttcacaaatttcctggagaagacataggaacaaaacagggccttctgtgatgaagaaagatgagaaaaatggagtatgacatcaggacacttagccttagtgttcttactcattacttttgtaaacctgtaacattttttcccatgctgttcccttttctgcttcatgtcttgattttcccatttgcaaaataaggatggaaacagttgcttcctgtttatttgatggggaatttaaggatgaatgggctagtgtttccttccccagatgtatcaacttaatcttatttattttctgtccatacttctgattccataatgtccaattgtatatgtgttttcaattcttttatttacattcttttccttttctgggattcttcaaaatcaaagcatgttaatcacatttcatagtgcacttgagtacccaagatactcttcagatatgggctaatgtttgaatagctctatttgcttttgagtgtctatcaaaacccaggccccagaccatcaaagcatgtaatatgagaggtgtccccagcctgaaatgcagatcagtttccaaggtgttaaagctttttctgaaagcctcactttggtctgctcagatgccttcttttcttttaacctagttgagcagttatgaaccaatgccatgatgaacagttgggtttgatcagtgcaggggtctattcaggagcattaactgaaaagtctactttctcatctgaaaaacagatgttttaccgtgatcctcaacatgtatgtgcctggcctctctgatactgattgagaaaaagaaaaacagtttagtagtcaatatctggggtcttcatcagctccaaataaactattaacagttaaatttcaacataagaaaaaatagagggccttgggactctgaaacaaaccactcattgatagaatttcactgaagatcagagccaaagtaatgcctaacaatttataaggttgtgcaggggaagaaaactggtcctgatctgatgtagggagtccagtgagagcaagcacttagttggagactcaaagttctgtagcatggcctggaagaaattagcttgtcctagaagattttgaagttaggcgctaacaattataagcatctatcactttgatatggctctcaaataattaaagaaattttgtcctataatgaggtgcctaaaggatataattgtttagtaatatttgagtactatagaatgtcttccagagagcataggttttgggttgccataactgatactgagttgttttttgtttttctgtctgaagtggccagagattcaaatgcctcttgagcctcctcctcgcatgtgcaagtaggactgtggtcctggcccacaggagcctcttcagctttcctccagctgtggcacaggacatgtgttcggttcactcgatcacattattaagtaacataggtattatttaaaaggagaagagtgagggcggagtcctattttatggcatttaagtttggaaccacttatgtcaaaactcatttctgtgtttatatgtacttcctaatttatttataataagcatgttgaattatgaaggagaatgttatttcaaaattctattggaggctacttagaggctgtggtgacactgaatgagagctctgaaggaaatcatagtgaaacaggaaaagttcccttgtccccgtcgcagggcatgcgacaagggggagtggcttgcttcttcagtgccccactgctcaaacctctaggggagaacacagatgggcaggctgtggggctctgaccccacggcagtgtctaggggtaaatgtttacagctgaagccccagtgaatgttgaagaatacgctttgacctacatattgacagaatttactgagttatagagtgataaatacttatttttttttcctaacaattatgtgatgttttggcaaataatatttcttttttctttttctttttcttttttttgagacagagtcttgctctgttgcccaggctggagtgcagtggtgcgatctcggctcactgcaacctccaccttctggattcaagtgattctcctgcctcagcctcctgagtagctgggactacaagtgcatgccaccatacctggctaattctttgtggttttattagagatggggtttcaccatgttagccaggatggtctcgatctcctgacctcgtgatctgcctgcctcggcctcccaaagtgctgggattatagatgtgagccactgcgcccggccgcaaataatatttcttaatttcagttgcatttatttttaaataggaaatacattcacctggttcagaatttcagaggttacagagctgtacgtaggaagaagttttgttttctcccaattccgcaagccatctgattagcccccttgaaggtagctcaagttactagtttcttttatttccttccataaatatttgatatgcataggagaaagatatatatatatatatgtatttatgtatgtatgtatgtatgtatatgtatgtgagaatgaatggataaataagcattcctctttcatacagttacttgcttaccatacctgctgttctataccttgcttaatttcacttaacactatgtcttggaattcattccatgttagtacataaaatgctgcttttttctttcttgtggttttgtggtatctattgtatagctgtattataatttttttttaactaggtccttactgatggacatttatgttgttgccagtcttttcattacaatgactaatgttgttttcttagttttcacttttcaattcatttcctaatttagtctgagcctacatattagtgccaagaactgaggtatttattgtgttctgacacatctgaggtatttgcatatagacatctgggtacatatgcacactgctgaactgtctaataatagtctctttccccaggacactctcctaaggtaaaacctatatattggaattcttatgctgtacatatatgctggatcacaactcttactgtcagactagagagtttcaacttttaacctgtgatttcagttattgtgacatatcctatgtttcaattagaagagacaaactttatttggtgagattcaaatagcgttcatgaaaacggtatcttttaataaagtgaggttaaaaaaatgggaaccacctaagatcttagagtgagaggagtagagattatgaaagcagttttactttttgattttagggtctttctatataatttcagcctgtatcagataattccgtttaggacacagctggtacatttaatgatcacaaactctgaaggtagtaactggatgcaataatcacacaacaaagtcattgagtaggtttgttgacttatgtcagattactctaaatcttgatgatattgcctggagcacaaaaaaggaatattgtcacagcaagcaatggaggttttgatactcgatcactggagtattcttttcccctaaattttgcgctcgttgtatcataactgctggtttcttagcctactctgatgttgtgcagaaaattgtacaatacttaaaaacgtgatatctaggaaagaaaattagtagaaaaaagccattagaactgatatatattagcattggtttggtggttacttattaaagataaaaatggagaatatttcatatttcttgatagaaaaaaagtaagttgccattcatgcaagtaaatcatattaatttaggtttttggcattttttttgttttctgagagaaacatgaagagttctgcttatttattttttatcttgagaatgggaacacattaacaagtacaagcgacaataaaacttactccataactacattatgaactatattaacttactctacaactcgataaccaacattatggttggttaaataaagagagtgaaaaagacagagagggaacgtgagaaagaaacaatctttttgtttcccaaagctgtaagaagcaatgataagacattgagtgtgtacgtgtgtgcatgttggggtattttagtattgtgtttatttttgttgggagtgagcagaaaatgaagccttcagtaaagaaattaataaatcttattagaacttgttgtaaatattttttaaattcctaaagttggaacactaaggcattatttaaactttatctctgttttttaaaatctgagaaacccattaacttttaccctagaaaatggaaagtgtcatatctcattttacagaggaagttaacaggtttattgtcttgttgtaacatcctaatcctgtgacattttgaaatagtgcttttggtagtgccttgtttttgaaactatagacctctggggcactatggacattttgtactagataattccttgtcactgggggctgttctgtacattgtaggatatttagcagcatctctgacttctacccactagatgccagtagcagcactcccttgggggacaaaattgtccccagttcagaacaactgctgtggacatacatggtggtcctacacaactggagtttaaatatggatcctgaacagctttcatcagtctgatgcacttccccaatatttgtaatcatgaggagcagagcaaaacaaaggcataaatgttggggtaatattttgttttccaaagaccactgctcaatttgggggaaatttttgaagaaacagcaaaggtaacccttggagtctggattggttggttggttgattgattcattcattcaacaaaaatatattgaacccctgctatatatatgcctgcctcaatactgatgacttgtacgctgctgtgtgtgtcttatggcagtatgttaaaaaaaatccgtggataataagtctgatggtagaccagttaagaagctgctagctataacattggtgagaaatgatggttgcctgggttttggtagtgacagtggaattataagaaattttatacagagatatttagaaggtaaaacattaggatttggtgattaactggagaaaggaaggcgtcaagaataatttccaggctttcattaagatgaggactagagtaggaaaaactgtcctttcttttggaataggagcagataattgacttcagcttttgacatttccaattggagctgcctttgagacatccacaaggaagagttagacagtgaacttgggaaataaatggattgtgtctgttttgttccttattgtacctcctgttctttagacagtgtctgcatttctagagacacagagagatttaggctggatgtatagattgggtgttcttcagggtatatagctagtttaattgaaatcaaggaagtagataacattatccaaggagaatgcatagagaagagggcctagtatagcaaccttatgagcagctttttcaagggactgaagagaggagggactggagaagtatgaggaaaatcaggagtgtatagttaaggaagccaaaggaagagagagtttgaaaaagaagggagtgttttatggttctgaattcagctaagagttcaagtaaaatacaaaaagattgtttaaattaaaaaagccattggattttgtaactaaaaagcatcagtggccttttagaagcctttttggtagtctggtagtttcaggagttcagtaaatttggttaaagagttaagtgggaggtgattggataggatcatgggaggtgggaggtcatactttcatgcattctggctacaaagaagagactgaagatggtatgtgaaggtggtattgaaatgggaaaagttcccttgtcccccttgcagggcgtgccacagtggggagtggctcgcttcttcagtgtcctgctgctcaaacctctaggggaggctagatgggcaggctgtagggctctgaccccatggcagcgtctaggggtgaatgtttacagctgaagccccagtgggcgtgtgtcacagagtgctcttttagttttgccgtctgtaggcggcttctgttagctcagttagactcccttccttatctcaaggacagagggctttctgtatcctggagttcttgccttggtgtaatggaataattgaatcactcgtgggcttggagaatgagcgcaaggttttgagtggaggtagctctcagcagatgggggaagccagaaggggaatggagtgggaagtttttcccctggagttgggccgcccagaggccggggctctccaacgactgccccagccaaactccgcgttgttggcttgccggtgtgctggtgcctattagtgcgttcctctcgctgtccagctgcccgtgtgttcctcggctcgtgtgctcctctcaacgtccagccaccatgtgtccgcctgctagggtctcggggtttttataggcacaggatggggggcgtgatgggccagggctgtattgggaaatacaacatttgggcaccaaggcagaagtgcctatactcacctaggcctgtgggcccaggtctgggggtagagccctcgccagggaccacgcgctccccttcccatcacttccctgccccctttctgtatgggatgcagggagggcatgtgggcttgagtatatttaaatgctgataaggagtcaaggatagaggttgatacgagagtggagaaaatggggcaacttgagatgggatgaatccaaagcacagggagaattaatcttaggatggataccctccaaagtcaagggatgttattggtgatgagaaaggcatattctgttaggattaatttctaatattgggggcttcttgagggaataatacttctggggtttcctgaaagttcagaatggcaggcattaaaagatgcctggggccaggcgcggtggctcatgactgtcatcccagcactttgggaggccaaggtgggtggatcacctgaggtcaggagttcgagaccagcctgaccaacatgatgaaacctcatctctactaaaaatacaaaattagctgggtgtggtggtgcatgcctgtaatctcagctactcgggaggctgaggcaggagaaccactggaacccaggtggtggaggttgcagtgagccaagattgcaccattgcactccaacctgggcaacaagagtgaaacgccatctcaaaaaaaaaaaaaagagagagagagatgcctgtgacagcccatactatttctgattccctagggtccactgatccccagagattccattaatttgataatgctctttattttgggtagctggcatataccagaattggaccctgaacctatggattaagtttgggtttggggcctaattctagtctaataatcagagtagcagggtgttctgagaccctctggagacttttcccattgtcaaagtacctctagccagtctaccttaattagcaaagatatcattcccattatgattcatcatgattgactggtctatatgatggattactgattgtagaaaactctggattattatagtattatgcttagaaaaccattctgttcaaatgttaaagggttgacaacagctcactttcttctgtggtttaacggaaagaaagttcgctgtggaaccagaaaaaaaatctggctccatcggtgattgagctatggggccttgaacatcctgtgaggatgttacagagtcatttactctctgtaacattacctggtaatgcctaatgtgcatcatggttagaattgaaggtcatgtatatgtaccattacattgttgatattaaataaataagaactgatagtatttttattgacttaaaataattattttattgacttaaaaataatatttttaaatatttaattatataattattatatatataattatataatatattatttatataattatataatatattatttatataattatataatatattatatataattatataatttattattatatataattatataatttattattatatataattatataatatattattatatataattatataatatattattatatataattatataattatttaaataaaaataataactattatttactactctagggccctaagtgagcacttattgttagaatttattgttagaattccagatcaaaatcaaggatctcatttctccatgaatctaagagctattattggtgatgtctttggtataagtttttgtaaggacaaaggttttgttacagtcctggccctactaaaacgtcttttattgacctgcatgctatcatagtaaatagagagaaaagagataaaattctagactttttaaggtatatggaaataaatcaaatttacttacttacttttttaccgtgaccaatttggatcgctgtcattttccatgaatgtgtctcaggtttttgtttttttaatagagagagttagctgtttcaacctctctttctttcgtctaataactcctcatttttttctccctcttttttcatcttcttcctttctttcagattattggaaactttctcatgttgcagcatttgctgctatcaattatgccagaaaagctttctgtgtactagcagtgttatgggatcgtgtgtgtgtgtgtgtgtgcgcgtgtgtgtgagacagagagagagagagagacagagagagagaggtgggggggagattgagatggaaagagtggcgggggatgaaggaagtgggggagagaaataaatggtgtctggggtaattgtgctggtgttttttcctgcatgagagaagcttcagatgtctgtctggctttggctcagttgctgtatgggcgtaactgaagaaggaggttggggtagaggagaaggcaattaaaactttgaacaccttaaatgcccttcctaattaagtggtgaggatggaaaatgaaataccttcttatgcttcatttctgttctccgtttaaaagtctgtggagggatcagagctcatgtccttagaaaggacagaactttcaaaataacaactctgaaaaacaagtttaaaaaaaatttctcatcattttctgcttttcatgaacttttaatataaagccatcattatttttttttcctgggcccccttacctatatcctctccccactctcattagtcactccaactttgaagcacccaattctctggagtattaatggagacagttcaagtatctaactgctgtttcctttgttcaagttgcttttggtccttgctgggaaatgctctgaaaactgaaccagctactgaacacaaaggctgacggtgttgtccctcctggtaatgtactgtgtgatttgttcccctctcctgttcatgactcattagtctctaagtacagaaaaggttgctcctctggaataaaaggaacggacccagctcggagtcctttttcgccttttcctgtgttttatatgggtgcactcacagttctccatcttcattagtgacccagcagggggctggcacagggttgagactagcttttgctggttccctggggtgtatcagagacctcagaactcaataccctactataaaaataaaatactgtgcttcaaacgaccttttgatggaacaaagccatacatcccaatctgcctgggcctctcaaattgagaccatgccaagtgccagatttgcattttgcacatgccctcccaccatcccctttcccccttcctctaaatgtggttcttttggtagcctcagtgtcaggtaaatgtttatgtgtgtgtgaaaacgcagactttggcaaaagaccttttgtatttaaattacacttcaagatagtagtttcttgtaagagatgtaggcagcagatatttgtgggcttttatgccctaaatgatatcattttagatttatatatgtgggcttttatgccctaaattatattattttagatttatatatgtgagcttttatgccctaaattatattattttagatttatatataaagtttaggaaagtaagcggaaactagaagtgctataaaaaactgagttacatattaaaaattcaagttattttttctggttttccagagtggccaaattattttcttatttaaaacctaggcaccctagagccatgtgtgtgcatgtgaactctactaaagtgagacactgacatgaacatagagtccatcagacctttatatcaagagcttggagtactcagagcatcgtatctcgttaatcttccagcattgatgtgctttagctcttgggaacagattactatacttattttaaagcaacagggcaaataaaaatagggatcttttggtattgaatgaccagcataactttagaaaatccaactctcttatccttcatttttacatcatagttacagtaacaggttaagattagcttttaacagattgttctaaatttctttaggtttcaaaacatattgctatgacatttaagtaatacttttaagactgtatgagacttagggccttggtttgtagagaatattcagttatttaagaaaagttcactttgattctatagtaaaataatgtacaggtgcaaatgtgtgatgttatttttggtttgtacttcaggtttgcaaacataccctaattttttacagaaagtatatggtagactctttattttaaaaaatgttcatagtctgggtctgtatgattttatttattttatttatttatttattattattattattattatactttaagttttagggtacatgtgcacaacgtgcaggtttgttacatatgtatacatgtgccatgttggtgtgctgcaaccattaacttgtcatttagcattaggtatatctcccaatgctatccctcccccctccccccaccccacaacagtccccagagtgtgatgttccccttcctgtgtccatgtgttctcattgttcaattcccacctatgagtgagaacatgcggtgtttggttttttgtccttgtgatagtttgctgagaatgatggtttccagcttcatccatgtccctacaaaggacatgaactcatcattttttatggctgcatagtattccatggcgtatatgtgccacattttcttaatccagtctatcattgttggacatttgggttggtcccaagtctttgctattgtgaatagtgccgcaataaacatacgtttgcatgtgtctttatagcagcatgttttataatcctttgggtatatacccagtaatgggatggctgggtcaaatggtatttctagttctagatccctgaggaaccaccacactgacttccacaatggttgaactagtttacagtcccaccaacagtgtaaaagtgttcctttttctccatatcctctccagcacctgttgtttcctgactttttaatgatcgccatactaactggtgtgagatggtatctcattgtggttttgatttgtatttctctgatggccaatgatgatgagcattttttcatgtgttttttggctccataaatgtcttcttttgagaagtgtctgttcatatccttcacccactttttgatggggttatttttttcttgtaaatttgtttgagttcattgtagattgtggatattagccctttgtcagatgagtagattgcaaaaattgtctcccattctgtgggttgcctgttcactctgatggtagtttcttttgctgtgcagaagctctttagtttaattagatcccatttgtcaattttggcttttgtggccattgcttttggtgtgttagacatgaagtccttgcccatgtctgtgtcctgaatggtattgcctaggttttcttctagggtttttatggttttaggtctaacatgtaagtctttaatccatcttgaattaatttttgtataaggtgtaaggaagggatccagtttcagctttctacatatagctagccagttttcccagcaccatttattaaatagggaatcctttccccattgcttgtttttgtcaggtttgtcaaagatcagatagttgtagatatgtggcattatttctcagggctctgttctgttccatcggtctatatctctgttatggcaccagtaccatgctgttttggttactgtagctttgtagtatagtttgaagtcaggtagcatgatgcctccagctttgttcttttggcttaggattgacttggcaatgcaggctcttttttggttccacatgaactgtaaagtagttttttccaattctgtgaagaaagtcattggtagcttgatggggatggcattgaacgtataaattaccttgggcagtatggccattttcacaatattgagtcttcctatccatcagcatggaatgttcttccatttgtttgtatcctcttttatttcattgagcagtggtttgtagttctccttgaagaggtccttcacatgccttgtaagttcgattcctaggtattttattctctttgaagcaattgtgaatgggagttcactcatgatttggctctctgtttgtccgttattggtgtataagaatgcttgtgatttttgcacattgattttgtatcctgagactttgctgaagttgcttatcagcttaaggagattttgggttgcgacgatggggttttctagatatacaatcatgtcatctgcaaacagggacaatttgacttccccttttcctaattgaataccctttatttccttttcctgcctgattgccctgaccagaacttccaacactatgttgaataggagtggtgagagagggcatccctgtcttgtgccagttttcaaagggaatgcttccagtttttgtccgttcagtatgatattggctgtgggtttgtcatagatagctcttattattttgagatacgtcccatcaatacctaatttcttgagaatttttagcatgaagggtcgttgaattttgtcaaaggctttttctgcatctattgagataatcatgtggtttttgtctttggttctgtttatatgctggattacgtttattgattttcgtatgttgaaccagccttgcatcccagggatgaagcccacttgatcatggtggataagctttttgatgtgttgctggattcggtttgccagtattttattgaggatttttgcatcaatgttcatcaaggatattggtctaaaattctctttttttgttgtgtctctgctaggctttggtatcaggatgatgctggcctcataaaatgagttagggaggattccctctttttctattgataggaatagtttcagaaggaatggtaccagttcctccttgtacctctggtagaattcggctgtgaatccatctggtcctggactctttttggttggtaagctattaattattgcctcaatttcagagcctgttattggactattcagagattcaacttcttcctggtttagttttgggagggtgtatgtgtccaggaatttatccatttcttctagattttctagtttatttgcatagaggtgtttatagtattctctgatgttagtttgtatttctatgggatcggtggtgatatcccctttatcattttttattgtgtctatttgattcatctcttttttcttctttattagtcttgctagcggtctatcaattttgttgatcttttcaaaaaaccagctcctggattcattgattttttgaagggtgttttgtgtctctatttccttcagttctgctccgatcttagttatttcttgccttctgctagcttttgaatgtgtttgctcttgcctctatattgcatttacaaaaaagtagattgtctcttcctccttgctactgcaaacaatgatgtgaggaacatcctggtactctccagggtatgtactgaggggtaggattgtagggtcatcaagcatacacaccctgatggtcactaaatcctgccagatttcttcctggaatggctgcaccagtctgcagcccaccagttgtgtaagaacactcctgctgccctacttctttgccaacattttatatgtttagactttctcttttttccaaactaatgggtgtaaagtggtatttaattttaagttgcatttctctgattactaatgaaattgagtacctctttatattactagttagttatttggctttttattgttgtgacgatttaagatttcatgttgatgtagatcttaattttgagttggtcaaacatatcactttttaaaatcttatactttataattttagggcccagggccacagagttattttctgacgttttgttttctgttagtcacatttacattcaggccttgattcatcttgtggtcacctttggttatatcagcatcgtttgaggtagcacattcacactctcaaatacagtgtgatagtttggtatgcactagagggccatgctgtatcatggattcattttgaaagagtatttaatgaaaaatataaaagaaggctattcatagcatattgccatttatgaaaatttaaaacacacacacatatatgtaaaacaacacttaatatttttcaaagaaacactccatatccaaagacagatgccagacaattaagtttttgcttatgaaggtttaggaggaaatgggggagtagtgataaagggggtaaaaaaataaaataagccaacagaggccttggacagactgataataatagtataccctgaattgaggagtatgattatccccacagtcagggtgaatataatttaggagagatgacctcctaataggttagtgatgagcaaagctggaaaaagttaattgaagaaaagtagaaatcaaatatttcagttgttctgaatcatgagtaagatgcctataaggaagaaaaattctcctaaatgactacatctggtcatgccttcttagcttttaaagtattttgtgatacacaggaatttatgtttttttcctgaggtgaagctctctgtaagaaggaaagcagatgtttctttttaagtgcttgtatacacctgccacaaggcagactgagtagttcatatggagagcaggctcgggttattttttatgttgcttgtgaaattaaaattcttttcctggcaagcataggtttataattaagtaatttatcataagagttcttttagctatatcaaaaatttgatgatatacagaagcaatatgtgagtggttacttagaaattagatgaatgagttatttcattggcatttatcatttgatgtgtaggtttttcctatttataacaaacattgaacactgactaattacctgcaactgaaagagggttaaaaaaaaaaagtcttagttgagaactgtattctcaacttattttcaacccaccagtgctcttgaagagtatgatgcactccgattaatagaagttgtgctctcttgggatcatgcttaattgtgttacaatataaagaagtcttcctccatggtatttatgggtatgaaaaaaaaagaagtctttctttgccagatatggattttgtacttccctcccttcaatttcatgtatactgttttttgtttttatttttctgattagttcccttggtatctgccctgccccatccccattcattttggtattcacatacccaataccatagtagcactttatatttactttgtttacgcctaattacagcctgcatattctagataaaacaaacagactcagccaggcacggtggctcatgcctgtaatcccagcactttgggagcccgaggtgggcggatcacgaggtcaggagatggagaccatcctggctaacaaggtgaaacaccatctctactaaaaatacaaaaaaattagccaggcgtggtggcgggcgcctggagtcccagctactcgggaggctgaggcaggagaatggcgtgaaccagggaggcagagcttgcatgagccaagatcgtgcctctctccagcctgggtgacagagtgagactccgtctcaaaaaaaaaaaaaaaaaaaaaaaaagaaacagactcagaaaggttaagtgatttttcgagggccatagagtaataagtagcagaaccagaatgtgaagccaagtctaactctaaagcccatctttttcatacttgactatcctatatttttcatggatattctacaaaatccatatttttatagagtatgatgtcttcattacgctcctcaatctttgaagaggattttaaccctgctctttggttcagctattgctgaatattgacacctttaagctgcaccatagaaaatttgtattcaggctccttttagagatgagtacttcgaactctctgctatccagttgctcaaaagtctgtttccaaatgtatttatagaatattgtgtgaatgacttattctccatccatttttctggattgtctgcattttagtttcaggccaagtcgtaccgtccaagagctatgtgcttaactcagctgcttttacctcttgcagaggtactttcttccttcctcctactccttttcgatattaaatcactggccttcaatgatggatgttatagcaaacagctgaataaaattcagtattctttctgtggttgagctttcattgaggagcccacctagtacaccacatcccatcgtttttgagaggacttacagatgaaattcttctcagatctcaaggtcaggaaacaacgattcatgtttttaaaatgcttattatgaatcttatatttgattgtattttcctctttactttggttgccaggaaggctagagccaaatttgcaagatcatctctaatagctgcaaaggaataaatgatatgtgtgtgtgtgtgccagtcttactcctggcattattttcttatctatgttcctgtttgatttcatctttcttaattatttattttgtcagtaatgaatgaattgtcataaactgccaaaaatcattatgctggtgatggatgcaaatatataaataacatgtgtaaggacaattaagctttcctgacttgatagttaaatctcattcctcctagaagtatcacatgtatacatccatcttcctcatttgtttttctcctttattttacttcctacacattttcagttgtttattatggatttctctcttgatgaatgcattcatacaattttagaattgttgagtatcaatataaaaagctattttttctgaaaattagtctccttataatttgtatttttcttaagttcatattttttagtaaaagtgtaaatttcataatttttattaaaacatttgcctccctaaagaaatttaactattttggttttttttttaatctgagaataggagtagggaaatttggagtctctaaggcatgccatgtagaagtttttgaacatttatatagaatggattgactttttctgcttgttcttctgtctgttgcctagtagatgtctctaactggatattcaaatgacacttcagaccatctgaaacttcacgtattatttccctcccaagtaaactagtcacccaaaccatatacacaacagtcagactcatttgctcacagctttaaagcaggttcttttccatttccactgctattacctattccaagtgccttgcacaactttgcctaaggagacactaagaattcttcattgaagagatgaagaaatgaatgaatacagggatgagttttcttcatttcattgcttctgtctagaccactggaaaaacgtatcttcctttattctgacctcttctaattcatgttctacaaagttatcaaaatgttattcttaaaatgcaaatcattcttaaaatgatatacaaacacacatcattccaggattcatttagtttagtgccaaggcctttcatgctaagttccctgcatctttctggtcttacctcccaccatgtctctttactgactttgttgcatcatcacgtggctgcatactccatttcctcccatgtgctgttcattctgcagaacatctcactgaagctttacctggagaactctactcactttgcctgtcggattcagatgtctttcctacttgttctcatagacatttatgtacagtctcgtgactcttttcatattaaactgttatcatgactgacttacttatctaggggctttctcttaatcaacacaggttctttattcctggatggtatccaacattccctgaataaccagtgattgtttattggctgtttgactgaatatagaatagaataagtctgtagcttatagtccattctaaccactcattcttttcataacttttattgagtgcttactatgtgccagcttttgtttaagagattggcaatactatagtgaacaaaatagtacctgcccaggcaattaaaaagtaagcaattagacatacaatgttgggtagcattatgtgtatattaatccagtttcactctgctgataaagacatacctgagactgggtagaaaaagaggtttaattggacttacagttctgcatggctcgggaggcctaagaaccatggtgggagatgaaaggcacttcttacatggcagtggcaagaggaaaaacgaggatgatgcaaaagtggaaacccctgataaacccatcagatctcgtgagacttattcactaccatgagaacagtatgggggaaactgccccaatggattcagattatctcccaccaggtccctcccacaacacatgggaattatgggagtacaattcaagatgagatttgggtggggatacagagctaaaccatatcacagtgttaggaagaaaataaagagggataaggaaattctagagcatatgctcaagcaaggcatatctaaagagggagcctttgagcagagacctgaatgcaatgagagacaagttgtgtccatggcggtgttgctggggaggtggttctgggcagagagaacagcatttctgtgctcctattatgtaccaggctctgttctaggggttctggagacagcaatggagaaggttgttaaacatcagcattgtttattatttaaccatgcagtctgttctttttcaatattatgtcatagttcaaaactcctcctttctttaattgctaggtttaacgaagttgaaaaaccctaacttgggaaagtctctttgttctccccagctgctaatcacttcctactctttgttgtggaagagaacacataaagtcttattatttagaggcccctaacagaataggatactggtcctggggacagatccccaactatctgaatttaatcatgatgctcagggatgtgtgaaagtgtcttaggtgttcatgtctttgacgtttgacctaggttatagatgtctgtgaaattctgtcaccataattagatatagatactactgatttccttttcccagtcttccaacccagcctatgaccctgagtaaaaccttcttaaattcttttacttcagtagcacacaaaaaatcataattttggatcctgttccttgctctgtcacctgcttgctgcagttaagtctgctctgtggcagttttccatttgcaagcagggcacccttccagttaagttgtaaaattttatgtttaagtaagcccctgtgcccttgaagaataggagctacaggaatgtagagtccaaagagaaaaaaaaagaaagagcattcctaagaaaactgtgtaaatttgcaaattcgttttcttctggtggcagctgacaggtggaatgacaacccaaccaagtaacactaggcccttgtgataggagggaacttaatgctgcggttgttctgcttagatggaattgtgtggggctgtgccaatgcctgtattgagaaagcccagtcgagcagaagagtttttggtttctgcatttagaactgccgaacaactgaggaaaaccgattaaatctggaaggtggcagctcacttgacaggcttctccaggcacctttgaggagaatcaaagataaataaacacattttatgagaggagtatggggtgagagggagtgtttggacaagagttaaaatttcaaagggagggggaagttctttttgacttttctcctgattagactcttgcctcatgtctttgttaatgtacaaattagagtttgtccctgtctacatgggtaagcttgatgggaaaggaagaagatagaagtatattttcaaagacctcaactatagaaggtagaaggaaactgatcaaatatgaatttctttattagaaaaaagtggctttaaaaactattttataagtcatattggatactcatgtgcctgtggaacatgcaaaaactctggcctgttgcacagaggtttgattttgaaactgtctaattttatttatttaaatttttttagagacagggtctcactgtgttgcccaggctcttgaactcctgatctcaagcaatcctcctgtctcagcctcccaaagtgctgagattacaagcatgagccactgcacgtggcccaaagtctgtaatttttttcagtaaagattgatggactttcattacggcctggtctagtgtgcagtgagttgccttgaggtcaggtagtacttgacaccccttatttactgggtatggaccctgttctctcatccttccattgtgctttactctttttttctccgtgaacaatttttacttgagcttgacttacctcaaaggggctatgaatattgaattggctaaaaataattcataacattctagatatatggagccttagagatcattgccctcttccccattttgcaaagagtaaataaagtgaagcccaaaagtgttaaattgctgctggcctaggggcattcagctaccaaatatgtatgcaggaactccacccagatcctgaccacactattagtctgttctcacctgctaatgaagacatacctgagactggtaatttataaaggaaagaggtttaattgactcacagttctgcagggctgtggaggcctcaggaaacttacagtcatggcagaaggggaagcaaatatgtccttcttcacatggtggcaggagagagaagaatgagctaaatggggaaaagccccttataaaaccatcagatctcgtgacaactcactcagtatcacaagaacagcagcatgttgtaaccacctccaagattcaattacctcccaccaggtccctctcatgacacatggggataaggggaactgtaattcaaggtaagatttgggtggggcacggccaaaactttatcattccacccctggcccttcccaaatctcatgccctcatacttcaaaacataatcatgccattccaaaagtctggcaaagtcttaactcattccagcattaactcaaaagtccaagtccaaagtctcatccgagacaaagtaagtcccttctgcctaagcctgtaaaatcaaaaacaagttagttactcctagatacagtgggggtacaggcattgggtaaatacacccattccagatgggagaaattggctaaaataaaggggctacaggccccatgcaagtccaaaatccagtaagacagtcaaatcttaaagttccgaaatgatctcctttgactccgtgtctcatgtctaggtcacactgatgcaagaggtgggcttccatggccttgggcagctccacccctgtggctttacagggtacagcctccctcccaggtgttttcacaggctggtgttgagtgtctgtggcttttccaggtgcacggtgcaagctgtcagtggatctgcctttctcaggtctggaggacagtggccctcttctcacagctccaccaggcagtgccccagtagggactctctgagggggctccaacccgacatttcccttctgcactgccctagcagaggttctttatgagggctccacctctacattagacttctgcctggacatccaagtgtttccatacatcctctgaaatctaagtggaggttcccaaaccccaattcttgtcttctgtgcatccataggtccaacaccacatggaagctgccaaggcttgggacttgcactctctgaagcaatggcctgaaatgtaccttggccccttttaaccatggctggaacgaagcagctgggacacagggcaccatgtcccaaggctgcatagagcaaggaggccctgggcttggtccacaaaaccatttttccctcctaggcctctgggcctgtgatgggtggggctgccatgaagacctctgacatgccctggagacattttctccattgtcttggcaagtaacatttgactccttgctacttaagcaaatttctgtagtctgcttgaatttctcctcagaaaatgggtttttcttttctattgcaattttttaaaactttatgctttgcatcctttttaaacatagattccaatgccaaaccatctctctcaagttcagggttccccagatctctagggcaggggcaaaattccaccagtctgttttctaaagcataacaagagtcaactttgctccatttcccaaaagttcctcatctttgtctgagaccacctctacctggacttcattgtccatatcactatcagcattttggtcaaagccattcaacaagtctctaggaagtttcaaactttcccacatcttcctgtcttctgagccctctaagtctctaggaagttccaaaatatcctacgtttttctttcttcttctgagccctccaaactgttccaaaccctgcttgttaccacttccaaagttgcttccacattcttgggtatccttatagcagcaccccactctactggtaccagtttactatattagtctgttcttatgctgctaataaagacacacccaagagtgggtaatttatgaaggaaagaggtttagttgactcacagttccacagggctgtggaggcctcaggaaatcatgacagaaggggaagcaaacatgtccttcttcacatggcagcagaagagacaagaatgaacaaaatgaggaaaaagccccttataaaaccatcagatcatgtgagaactcactatcagaagaacagcatgggggtaaccacccccatgatgcagttacctcccactgggtccctcccatgacacatggggattatgtgaactacaagaaaagatttgggtgggcacacagccaaaccagtcaacccccacaccaatgcatgtcttttgagttgcttagagctcaatattgcataagtggactatagcagtttactttattgacttataaaacataattaataaaataattaaatgtattccctgtataattcaaaacctcaggagttatcataatagtttcaatctctttttctatcatacctcttatgagaaactagaaaataaattaccactttgagtttcagtttgtgtttattttcttgccatgaagagtatgatgataaaaaaacataaaatgaagtggcccagaggcaggcaaccagaaggtgaggaacaaaaccaaaagtaatagattattagatgccagtaactaagattctaaattattactcttacgaatatagtgtgggttgctttaactatttcgttataatgtttatgtctgcacccatttctcatttctttttcctagtgtgcaaagttaatttaaagtgttagtacaaattgaggaagggaagtctctccagatttcattagaggatagactgaataagaacatgtcctacccgcaaggacaaaggagaagaaaatatattcttgactgtttcagaccacttcagataaggaggagacaatttaaaaaattaatttaaaaaaacacattaggatcaaataacccctccaaagaaaggtgttctatggatgagaaatgtaattactgctgtaaaaatgtagggaattttgcacgtttaatatagtttgtctcctattagaagcactagttggcatttttcagtattagggttgtggcttgccaggcccaccctcctgctgtgtttgtttcagggaatagaacttacccagtcgcaggtttcagaagagctgaggtaacctccttcaatgtgacacaagtactgtttatgttggagacaaatcccagaaactcaaggtaacaacgtacacagagtgagagagtatatgcaagagatttttatttggcatttttactgctaacagtctacagaagttttagtatttagtgccagttcaggcttaaggggtagtttctatttctgtgtgattttgaaaggtttaaagaatcagcaaattattatataatagataataaagaataaagattctggcttctatggaagcttgcaaagatatgagggagggcaaacaactgcttctacgtgttttgttttgttttaagaactcaaaaaagcatggtaggttctttgagcaaggccttagttgtcaaaagtttctgaagccctcaaaccaataaatagtattattactaattaaaagagcagataaactgagaaacaaagcacttagacctagggtgacatggtgagaccaaaactgaattctgtgtcttaaaattcagttatctaatctccccacttcattgcatattctactagcagtcattcagtaaagtacctttcatcactgcaggagtctctctgaacacagtggctttggaatagggttatctccagacattgttgacatcatgtctctgctcacataccaattgagtgaatattggcccacatgattcttgtaagtggattacaagaaatccacgatagacttcattcacttttgatgaaaccaagaactttccctcttgagctacctaatgagatactgttatttgtttattatgcagggtacaggttggggcttgttagctctctgaattcttaagcactcaactgaggaaatcaaatgcatgattttactatgcctgcacaggagttggagaaattcataaagtttatactttactagttttcttaagaatacagatgtaaataggctgttaagtctgcccaggcagaactgttgtttcagatgaaacttaatgaccacaccctcccaccccaatggagattgaaacagttggagaaactttagtttgaaaaatatttactttaaactaaactccaggaatcttttttttttttttccccttggtgagaaagatattctcaggtctattcggagatagcaatatctttaaaatcatgcaagaaacaaaatttcggagcttctcagtggttaggaatagcttcggacaatttacctaattgggcttcagtttcctgacctgtataaaacaagaggattggtaaatgctctccaacattgcttgaagctcctaggttctctggttactttgttatcgtcataaaatgataatttaaaaattgatgtatatgcatgattttatgtatgtatgttatatatgtatgattgattatacttgcctatgtatggaaaatttcaggttgttaataagaaactcgtttcttttggagaggaggactatgggcctgggggtcaggatgggagaattttgcattattttatactttctgtttgcttgttttttactaagtatgcattgtttaaagattttaaaaatagattggttttgttattattttaaaaggatgaaaggaagactttcaaattattgtaaaatctatacccaggataataataattggaatttcatttcagactccaagtttaaagtatttgtaattataagtagacttttgcttttattatagtaagaaaagtcttttaaattctcttcttcaatgaaagcaaccacttttgtttggtgaaacaagcagcatttacaagcacagaaacaaggtttagcaatattagtgacaggattatataccttctatttattgggtcctctaaaagatcatcttcctttgatttgcaactatgggaatgaaatagaagtgggaaaaattagcttttaaaccaattagttagtaatgactagtgccaagtttaaagtgtttcagagtgttattgcggtgttttaaatgtaaaacactagctccctcttaatctttttagaagataaaactgcaggaaatgaaaaagtggtcagttgaaacagcagaaggcattttagaggctgcatatagtaactggacttggattttggtttgagcattcgttttgttctattttcctatttttacaaatatttgtattaggttttgagaaactataagaacccagaaactagatgtttctagcttgacatatttgtggggttctttttatttttatcatttctacttttgtttcttacttaaaaaaatgaacttaaggaaatatacagaaaaaataactcaacaatcattttcatttaaaaaaaattagagtactttctagcatggttaatatatcattataatcaatatgaagtagatgtggtaggtttttttatttccagttgttctgtcaaaccttgaacattttgccctatctggcacaatgttttctagccttttccatattcaacaatgtcaagtaagtaaaagttaatttaaaatgaacttcagtgtttgtgtcacattggagttgttaaagttctcctttgttctttccaggtttgcattgcctctggctaaatttatttgtatttccattccatgcagggtatggtagcactgtgattcagcttacttagtacttcattggaacgttgggttatttatgctaaagtcaataatctcatagtgatgatgatgatgataaccattgctgtcacttattgagtccttacttttggtagatactacattagacttttaaaaaactcatttaatgggtattcattgaacaccttttatgccccaggcattgatttaggagccaaatacataatagttaacaagacaaagtcctggcccataaatatattgtttctaatccacataaaaccttgcaaggcaggtattgtcttaattttatagatgagaaaactgaggctacagaaggagaacaaagttttcagcattttatagcctgtgagtgaccagtctatttaattccagtctgtactttgctctgttctcctgcctcaagatagatcagtattatttccctcttcattaagatgtttataaacattcaggactggtataaacatgcttggctatgacacagttaagctgacagggatataggatgtgaagtctataaacaattattccttttttaccttagtgctccatgagagctagaagagacgctaaaacctagtacttttcacatcaaaaaacgtaaaatactaaggaataaattgaacccccaaaagtataagatttgcacactgaaaattataaaacattgttgaaagaaattaaagaagcctaaataaatggaaagatgtcatatattcatgaatcaggagacttaatattgttaagatggaaatactatctacgtggatctacatagtcaacaaaattcctatcaaaaccttaaccaatactaaaattcactgggatccagaatagccataacaatcttcaaacaatcttttaaagaagaagaaagttggaagactcatattttccagttttaatactcagtataaaactatagtaatccaaacagtgtggtcctagcataggataaaaatacagatccatgaattataaatgagagttgggaagtaaactttttcatttttgattaattgaatttttacaagggtgccaagacaattcactggagagtagtctcttcaacacataatactgggacaatttacagccacatacaaaagaacgaagttgaattggtactttacagaacacatcaaatggatcagacacctaaatgtatgatctaaaactataaaactcttagaaagaggccatagagcacaatctttgtgaccttgaaagacagtccacagaaaagaagaaagtaattgcaaatcttacatatgataagggtctagtatccagaaaatatggagaacccttataatataccaatagaaagacaaataattaaaagtagattaataattttaatagattttttccaaagatgatgtgcaaatggccaataagcacatgaaaatatgctcaacagcatcagtcattgatggaatacaagtcaaaaccataataagataccactttttaccactaggatggctatgataaaaaagatagacaataacaagtgttggtaagaatataaaaaaaatgggaactcacattcctcaaaaagttaaacatagagttaccataggacctggcaattccacacctaggtatatacccaagagaactgaaaatatgtttacacaaaactttgtacataaatatccatagcagcattattcataatagtcagaaagtggaaacacctaaatgtctctcaactgatgaatggataaacaaaatgtggtatatttgtacagtgaaatattatttagtaatgaaaggaataaagtagtgatacatgcgtcaacatggatgaacgttctgttaagtgacagaggctaatcacaaatagctagatgttgtataattccttttatacaaaatgttcagaataggcaaattcatagagacagaagagagataagagattgccaggatctagagagaggcaggaatgggaagggacagtgactactaatgagtatcgggtttcttttcagagtaatgaaaatgttctggaattagatattggtgatggttataaaactctgtgagcactctaaaaacactgaattatatactttaaaagggcgaattttatgatatgtgagtaatatctcaataaaattgttacgtatatattttttaaacctattaatttggcttcggtggtttggatttagtccaccacttcaattatctgtttgtgtctgggttattgcaattcaagtacaatatagtctcaacctttattgtctatgaggatcttcaattttcattattttatcaatctgcttgtctattgccttactttataccagctagacttattatatacaggcaaaaactgatacagagcaatatgatatattttcttcttgattccttttttaaaaacttaatgttatattacttttcaaaccaagagtggcatattgttgtaattatatcattaaaaaatgtgtttattttcaagagtatggatttgatttagaaactgcttttcctgcattctctattattcatggcatttgatgaccacacacttgaagtgctccctggccagagcgtaagagtcttgggggtggggtcagtatagaaatgattaatggtttgttaaaatgcaggcaagttgaatatgacttttataatgtggctgtgagaccagcttatggtatgaattcatacatgtctctctcttttgtaaacatgttatcgaagtaggttttatttcttgaatgctctggcctggtgctaatgagatgtgtgagtgtcctacccaaagcattatgtaacaggaagcaaagttttctgagggaaataagaagcttactagaaagagaagataaaatctttgctggggaatggttcttttccattagcattcccagtgcatttctccagaagtgtgcctaggaatcctctgctgtagttgctagataatattccctctttttcagggtgattggagaaagaaagcagttatttggggcctggagtatatagatagcaaggagccatggttctgaatgtggtgattggcccaggcattcttgctagtgatggaaatagagggctgaacaggaaagagtgggcagcagtacttgataacatgaggcactggtaataccaacttcatgtctggtcttcccatttaaaatggattatattttagcctctcgtcagattgaatgctaagtatccctacagtcaatgcctgcaaaatctttggcgtacttacttcaaccaaaacttaaactcaaagaggaatatagtgtaaactttggtttaactgaacatagaaagatcacacagagagccctggttttattgcttggaaacatgatgagatgtaagtactgtcaatagattggagactctaggcccaaatttcactgaagttcataaatgtctgctaatttcagggaccatcatacttaggagctagtatactaagaaattggaaagtaagtttaacatgtcttttgtgaaaggtggaaatttaagatagggacacagctgtctgcaagggacagtaggcttgttttttgaggcactctgtggcattcaagatcctaggggatttgaaactcagagaatggtacagtgaacataagaggggtggaaaaaagtggaggatgaagtggttatctgtgtcaaaaggaactgaaaggtgttcatactgttccacaatcccctcttcttaccattattagttaggtaaagagacaaaactgaatggcttccctttctccatctgtctcaagattgtttcctgccttggttgaaaggaaaagagggagggagcaaagtggcattacttactttggtctctctttttagatctttgggtcccaaaagtcttattggtgagaatatctggtttcataagcagaagtgggaaaaataattattactacttattgaacataagaactgtgctaaacaccctaataacattatttaatccgtacaacttttttgtataagcatttatctataagttaatacatgtgaagcacttagaacttagaatgagagcccattaaatgttaatacccattttggagataagagaactataccttagcattggtagaattttaatacatgattgttaaactcaaaagcccatgatctattatgcgatactgtggctctcttccttaagaactcagcttcctttacaaaaatcttccctgatattctcctctatatgcatttagaatcatacctgtttttcaattctatattttgactaattccaggttgtcagtcctaaatcctcttactctccctgcacttatccctgaggaagttcattcttcagattatcaaggtctggaccaaatttatttagtgagaatgtggaatttttcttacaagattttaaaatgacaagtaagataattacatgaaaggatctgtctaggctctttttgcattgtagggggtggaccaagtaacctttggatcacttccacttgtataattcaccatttcggcaggacagtaacatttcaggccaaagttcaacttttttttattattaaattcttttattgtcgccaggaaactagagaaaatgaattcttcacagtatgcttgtgcatgcaacttgaaacggtttgcacactaaatgaaattaaatgaaagacagctgtttgagaaagagctgtcagaaactgattgggttctattagagaagaatagaggccaggaataagttttcagaaacaggatatcagtggttttaaaagcaagcaaatttatacacacaaaagctctcatgtggttgtgctgttacatgtcttttcagttcatccatcttaaattatttgcttttggtgagtaggtgtctgctttcaaggctttctttcacatattgaatgtgtgacagttctctcttttctgagaagtaaatacaacacaaccccactacaataccatcctacgtactttggttttgggtaaactgaaaatccagtaatgttcaccaaactacttcctttgtccagtacctctctgttcctgccaaaatacaaagggaaaggaccatcttgggcaggttgccagaagtgccacctgggtctcctgaaatggctgtcagcaagaagggagcaattacatcccataacagactcaaagcagatggtcacctgcggtgataagtattacattattaagcctttgatttgtgattgtactttgtgctttccaggcactgaagttatgttacttgtgcgatgttcctctctgttcccctagacctcattgctcgttgtttggccatgtgttcccatggcttatcctccaaaaagctttattctgcaatcttctaactctcctgcaagaggctagctcataataggatctctgccaggccctccagcagtaggtatggtgttattacatggagttacctttaaaggaatttttaaaagcctttggggctttactgtggaagcataacttagtcacagtataacctcatataggaaattcagttagtgttcagagttaggagtcctagtataacattgcactcattgagatttagtctctggagtctcttcttccattgaatttttatgttttcagccctatttaacaatggtcttccataatgcattgaggctcaatctcaactgtcctcctttgagatctcgcttgccatcccctccacaccttctttattttctgaagatttagaatacaaatttatagtctctcctatagctgaagttaggagtcacttgattcatagggtgcctagctccctggactaagatagatggcagaatgtgcgtagagatacatgatgacacagtcacaaatctaattcttcatgcagatagtctttcaaaattcttagcaaattttaatttttaatattgtgagcctcagctgtagtaattcagatttaattatcatgtgatcatgctggggtgattgtttttagtgcagacataggaaatcaaagttggcagctgggctgcagctgtgccccagctggttttatctgagttgaattcagagggagaagtggcagcatgctcaccagctccagaagatagtcttctttggtcatacaaagcaatacctgctagatgctttttgagctagtgcaattaacacccaattagtgagacttcactataaaggtattaagaacatagtccatgtgtagtggacatgtcatcattgtttctttacaaattaaataaacttgctacgtagaaaatttactttatataattagacagtgttttccctaaattacaaaaacatgctcttaaatttggctgtcttaaagttctctgaacttgtaagattttgacctaccatatctaatttttgcctgaaaatattttatagatgctgagtacaatagcatatttatgtttaaaaatacgaaattggtttattgattttttaaattaattcttactagaatttacatcagctacttctggctttcctgcaggaaaagaattcttgcagcttagattaatcaatattgtccctattgtaaaagacactatattgaaagctgtaatataattttcaccatgcataataacaaagagtgtctaatatccataattattaagaattttacccatcgaagaaaacaactcataagaaaaatagctaagagttttgaacaagtagttcatagatgaagaattataatttgcaaatcataaagtcactaatatttaaagaaatgcacattttagtatgttctacaagaaggctcttcctcatgcattaaactctcaatgtaaatgtgatacttaatgaggctggtgcaaataaggaaaggttccctcataccaggcattcctacaaattctcttgggaatgagttctcacagtacgacttctggttgaaggctttcccatatacaacatattcatatgatctgtgcaacatgaattctctgctttatgattagagctgattactgtgagaaggctttatgactttcaggaaacaaataagtttttttttccatatatgaatgctctgatgcatactgagaactgattatctggataccagggtgactgaatggagcccttatcacagtcactgcattgataggctttatcttaagtatgagcatgctgggtttcttcatatttgacatttgaaggcttcctcacagttagttcacatataggtttctctcctgtatgaatttagtaacgtagttgaagatgtgatttcttagcaaaagacttctcacagatgccgcattcatgaggtttctctgaagtatgaatcttctgatgagtaggcaactctgatttctgtctgaaggcccaccaacattcagtacaaacaaagagtttctctctagtatgaatattttctgggatgaaagaagacttaatcttttggtgagagttttccacactgaatacatatatatggtttttctcctgtgtgaactcaactgtgccctaggagttgtggtatcaggcttgttttcttattttattctaaatgcttgtgatcattgctagtgacagccttctagtcctgagccacagccaacccttcagcctcactgaacaatgtgattggtactagattatatatatttttgttttatatttgaatatattaaggtgaagttggattattttctgtcacataattgaaatggttccacattacattattggaaaatcatttgttttatactgacccattacctgatattttaccattgaatggcatttttagtatctttgtgtgattgtctttcaattgaagtttttgagggatatatgcagcattttgtcattaaatttgtgcagatacatatgatggtttctctgttatattttataatatataaaacgtgctaaaattgttacagcaagaatatttgttttcttaatcttgttactctcattgtgataagtttcttattatcaaaagtggcctaaatagttatcaacttatgtttcattgtcatgggtttaatgtacaaatagagatattattaatagtatttcccaagtctttaatatttcatttttattggatgtgagatcatctgccagagataattaatttcatattatttgtgtaagtattatttattgagtgttaatacatagcagatactgtgaagaatattttatgtaccatctcatttaatcatcttagtaatttttagtatgaaactaggttttcttaaaaagtcaggaaacaacaggtgctggagaggatgtggagaaataggaacacttttacactgttggtgggactgtaaactagttcaaccattgtggaagtcagtgtggcgattcctcagggatctagaactagaaataccatttgacccagccatcccattactgggtatatacccaaatgactataactcatgctgctataaagacacatgcacacgtatgtttattgtggcattattcacaatagcaaagacttggaaccaacccaaatgtccaacaatgatagactggattaagaaaatgtggcacatatacaccatggaatactatgcagccataaaaaatgatgagttcgtgtcctttgtagggacatggatgaaattggaaatcatcattctcagtaaactatcacaagaacaaaaaaccaaacacggcatattctcactcataggtgggaattgaacaatgagatcacatggacacaggaaggggaacatcacactctggggactgttgtggggtggggggaggggggagggatagcattgggagatatacctaatgctagatgacgagttagtgggtgcagcgcaccagcatggcacatgtatacatatgtaactaacctgcacaatgtgcacatgtaccctaaaacttaaagtataaaaaaaaaaaaaaaaaaagacaccaccattcagaacacaaaaagctacagaaggtccaggctactgaaaagcatcaagaccaagctgttgtaagtcaaactgcttttatgattgcattctttgatgaagacaatcccagaaaaagaaggtcatattctttaactcaaagtgcgggaatcttgtgtcagggaactacatattcaacaccacatacaaaacttgagaaagcaaagtcttcaacagcagatgccaaagtggtttctttgtctttacagactagctctgtgcatcacagagtggggcatggtgttccacatgggaaactgttaaaacagaaatcagaggagccatcggtgtcaatacccttcctacaaactgcattattaagaggttcagggagtcttgggcacagaccaagccaggagatggataaaatgttaaaaaatcaagcaacttctgctacttctgaaaaggataatgatgatgaccaaagtgacaagggtacttataccattgagttagagaatcccaacagtgaggaagtggaagcaagaaaaatgattcacaaggtaaataattgaaatttgagtgtgatcttagttgttgtgtggtgtatttgactggtggaaattattggagagtcagcatgagatgttgtcatgcagtcagtggtatgtgaattttagggttttattagggaactgcaagactaacagtaagaccaacatgctttgtgattttatttgctgatattctgaatttacctgagtttcatacataaagctctgtacatttaaaaggttaaaaaaaaaaaaaaaaagaaactaggttttcaagttggtaatggtttcagactgtctatgtaaagcataagtagcatgatttgaagtgattcattcaaaaaatgtataaaatcagagtaatagaagctaaattactcaaatcttgctcagatataaaattttttttcagctttcataggaatctgcccttcgattagtgagaaaatacggtcttctgttgaagcagagaatttgacagtcatgacattatattgtgaacctttaagttttactgctttattttctgtaaattactacatttctatagtaatttcgcagtgtaaatgctgaatgaatgtgattagctatatttgcaggcttagagcatctgtgaatacttcctggtttttggttagttgtgtttattcctagttctatgtcctattgaattggactttgcttatttaaagaaaagtctataaagctacaggcaagaaaagttggaatttcttccttggggaaatctcaaatgtagagttttaagtaaatattaaggttcaaaatgggcaatataatgagcacatttgaggaatttgtaagtatttatgtaacacttcatgtttacaaaatgttttacagccatattcattaatttacataagtcccttggaaggtaacaatgttattacatgtgttttattaagcaagacaggtaaaatttaggcaaattaagtggcagaaaggaagagacattaaaacatttattctgtgacttgcgcctatatcatagagcgtgctcctgcattagggaaataaagaaataaaatgcttctcttttgttatagacttgatcatggtgcctatttgggtaattgtttatatatattcatatagttttatatattttttattttttgattatgagacacaaaggccttccaacacaaatttcaatgtatgaaatatctcaacttaatagctgaaggataagatcctgggttataaattctccattaaatgttgcagttatcatgatcaacagattggtgaatatgtctggtggctgctcagtattggtctagatagaatatactatgggaccaaaaaagatatgaccgtggagagctcactttggtggccacacactgcctgcaggctgcttgttctctgccactctgttttttgggaggactttcctttccctctcatagaatagcaaatttctgctaaaaagtaataaatttgctcaaaatatcaaaaaggtacgattagaatatcttccatagtaaaagagattaaaaataacctagactcttgcattagaaagcagagggagacatgacaaattattgcattcaattaacttttcttttacttactgagtgcccagaaattgctttaacaccctgaggtgtgaccataaggtaatgaggagtgatttttaaaaataaatataccataaggtacactgtttaaatgagtgctattcttcaatgtagccactctttacactaatccaacgatgctgtcattgcaagaaatatttttagaacttgtcctttcgaattgccgttagaagccatttatggactatagaagaaaacagtctcacattgacttaaagtcgcactacattttttaaatcaacccctcccctgcaaagaaatttattacccaaatagattactgaccttttcactaacctttgttctgcatttttttcttttcaaaatcagttctataatttaaaaaataacaatttgccatcaacaaggatatttatttcctttttattttgaaaagagttattaaaaaatctatatcagaaaacagtagacaaaatagtagtttccatatatccttcacccagttccctctaatgttaacatctaatataagtatagtacagttaccaaaatcaggaaattaacaccaataaaatactatttggtaatcagtagacatcatttaaatttctccaattttccccactaatatcctttttctgcttcaggatctaatccagcatcccacattgcatttagttgtcatgactccttatgctgttccaacctgtgacagttctaatgaggacatttaaaggaagtgtgcccctcgcccaccaaaaggaagaaagagccatagactctgaatgtaattccaaaaatatctttgtctctgtagctgtcttgtcaactatgtcttttatttattggattttttgtaacctgtgtaccaaatttatgcagattgcagcaataagaagaagggtaagatgtgcttgggcacaaaggagttgtgaggacaacacatctgtccatagccattgtgcaggtgtattttgagctctgcggatttttttataatgctttcacatttggttcaaaatattttaaaatcttcattatgatttctcatttgatttgatcctcatttataatagctcgtgtgtgtgttgtgtgcatgtgtatgtgtgtgcacatgtgtgtgtgtgtgttcattcatttcaggaactttatctgttaaaattctttgaggccagtgtttaaagtatgttcttcaagggaagattcctatttgctcccatcagatgcttgtgaacacttcaaatgcaggggaaccgccaaacaagttctttttttttttattgagacaaagtctcactctgtcacccaggctggagtgcagttgtgcgatcatggctcactgcagcctcgacctccctggcctcaggtaatgctcccacctcagtctccccacgtacaggcacgtgccactcactaatttttctaatttttttttgtagagacagggtgtcaccatgttgtccatgtagctgagactataggcacgtgccaccgtactcaactaatttttccgatttttttgtagagacagggtctcaccatgttgtccaggctgcagttcttgatgttaatttctttttttttttttacaactattttatcatttatttattttttattttattttattttattattattatactttaagttttagggtacatgtgcacaatgtgcaggttagttacatatgtatacatgtgccatgctggtgtgctgcacccattaactcgtcatttagcattaggtatatctcctaaagctatcccacccccctccccccaccccacaacagtccccagagtgtgacgttccccttcatgtgtccatgtggtctcattgttcaattcccacctatgagtgagaatatgcggtgtttggttttttgttcttgcgattgtttactgagaatgatgatttccaatttcatccatgtccctacaaaggacacgaactcatcattttttatggctgcatagtattccatggtgtatatgtgccacattttcttaatccagtctatcattgttggacatttgggttggtcccaagtctttgctattgtgaatattgccgcaataaacatacgtgtgcatgtgtctttatagcagcatgatttatagtcctttgggtatatacccagtaatgggatggctgggtcaaatggtatttctagttctagatccctgaggaatcgccacactgacttccacaatggttgaactagtttacagtcccaccaacagtgtaaaagtgttcctatttctccacatcctctccagcacctgttgtttcctgactttttaatgattgtcattctaactggtgtgagctggtatctcattgtggttttgatttgcatttctctgatggccagtgatggtgagcgttttttcatgtgttttttggctgcataaatgtcttcttttgagaagtgtctgttcatgtccttcacccactttttgatggggttgtttgtttttttcttgtaaatttgtttgagttcattgtagattctggatattagccctttgtcagatgagtaggttgtgaaaattttctcctattttgtaggttgcctgttcactctgatggtagtttcttttgctgtgcagaagctctttagtttaattagatcccatttgtcaattttggcttttgttgccttgatgttaatttctaagctgcaggtttttaggccatataagtggtttaagtttctagccctaaatcacattaggcaggttttagatagaaattctcattagggcagagatctttgttacccagtgcctggaaaggtgcctaacaaaaactggccctcaatacatattcattgaatgaaaaaatgaatgaatggggaagacccttgtcccctgccttttttttcctgatatattcagaaccacatctgagaaggacaggtcttctgcttcaaggtgggtttttttttcttagtttgccaactgagggtgtcaccctttgggagcctggaagtctcaactttaagtaagggtcctcatttaatctcttgtcctgcttgggcccgggctctgtctgctatcctcccaactctcttgccatgtgcccatttagaacccaggctctagttcattaaggattggcaactgctctcaggaaagaatcctcccaagtttttttccttctgagaaatgttatttttttcagttgtttctggcttacatttatttctgttactctctggctgaaccatgcttaaaaagacatattttatattttaggtgtgatgtactagtcttctgtcatattgctaggagtgtgattctctgtaacaatttctttagagaaggtataatgtaaagtaaaaattaatatggaggaatgggttatagggaagttagtgtccctgagatcatgaaattatctctttacgcactggaagttatttttttctctcgtgtttcaagttagaactttttattatgtcatagattaatcacactgctgtcacttattgagtgactcttgtgcatcaggcattttacatatattatttctaatcatcataaaagctttgcaaccagacttagcagctttattgcaaaagtgaagaacctgaaagccagagcatttatgaaacttttccaattattccaggcagtgagaaattgtagtagacatgttttatggcacctgcttgccatgcttctaagaggcgttattcctccttgttgaggagtaacagccctggtttgtaccatatgaccccatccccatcttctagtcaagtgatctaaggatccacaatccttagcttggtaagtgccctcttgctaacctaaaaacgaaaaagtcaacagcttgctttatagggaattccagaagcatttccataaacttattaagccaatgatcacccttattcctactatcatttagtattgttatagtagcactagacaaaggagtcttacaagaaaaagaaattagaaataaaaaaaactagaaaggaggcatattaactataccttctaagtaatatgattgtatatttggaaaaaccaagtgattcaactaaaaaatttacaaaaataaaagaattcataatgacagattctgagaaagaagaacattgcggtgggactagaccaatttttgtaaaatgtattaagctacaataacttaaagactgtggtgctggtatagatagttaaatggaaaaaaatgggacatccaaaaataaatgtggaaggagtataagatatatatacatatcttatatatatatatttcacataagataatgttggcattgcatatcacaataaacactggagcattcaataaatcttaccattaggcaaagaaatggagttgaatttatatcttaagccttatccaaaaataaatccttgggggcaacaatgatttaaatgtgaaaaataaaatcaaaaaagtattggaagaatatctaaggttatttaagataatttctacattagaaagtcttttcaagtataatataaagcacagaagccataagataactaactttaaatactaaaaaacaaagtttatgcataacaagaaaatccattgtaagcaaagtcaaatgacaaatgaaaatctggagaagatatttcacatgtatcacaaaccaagactattttccctattgaatagagagcatctacaaataaacaagaaagcaatgaccagcgatgggtaaaggataaggacagatcacagaaaagtaagcacaagtgcttttaaaatttaagaaaaagatatcagacttccctcctgatgaaaattaaatggaaaacatgatatatcatattattgaagataaagaagcttgatcaaaactggctataaagggtttgagaaagcagttggttttatactttttggtggaatgataaattgttagatacaacttctgtgaaggccaatctataaaaaaaacttaaatgcatgtatcctttgactaagcaattccacttaaggaattttcctacatttgtgtttttcatttgagcaaaatgactgacataagtatagttattgcatcaatacttataatagcagaggactggaaacaacttaattgtcatcaataggagactgaatcagtatattatggtactccatggaatatactgtgcaacttgttaaaagaatgaagaagttctgcagtggtaatggaacaaaatccaagatgcattattaaataaagcaaaatgagaacagtatgtctaacatgctctcctttgtataaaacaaacacacacacacacacacacagacacacacacacaaatgcatagcttatctttgttgtaaggttgtttccaggggggggttttgctgtgtgagaaacaggaaaaagagactttcttttcagtgcaaatccttttatgttttatcattttcaggctttgcctgttccataaaaataaaattaaccatataaatgtcaggaatgatcttttcttttctttttttctttctttctttttttttttttttttttgagacagagctgtctcctccagactggagtgcagtggcatgatcatggcttactccagcctcaacctctcaggctcacatgatcctcccacctcagcctcctgagtagctgggatcataggcgtgtaccaccatatctgactaattttcttcttgatttttagtacagtcagtatcttattatgttgcccaggctggtcttgaattcctgggctcaagcagtcttcccaccttggcctcccaaagtgttgagatcgcaggcatgagctaccatacctggacaggaacttagtcttttaaaaagttagatgatatcagctgggcacggtggctcacacctgtaatcccagcactttgggaggccgagatgggtggatcacttgaggtcaggagatcaagagcagtctggccaacgtggtgaaaccccatctctactaaaaatacaaaaattagctcggcatggtggcgcacacctgtagtcccagctactcgggaggctgaggtgggagaattgcttcaacccgggaggtggaggttgcagtgagccgagattgcgccactgcactccagtctgggcaacagagtgagactccgtctcaaaaaaacaaaaccaaccaaccaaacaaacaaaaaactgttggttgcatttcaaaaatctaactgaaaagactttgtgcacaagcaactgcatggaatttcatttatccatcttggataaaaagcctagttggtcctgctatgatttgactctgtgtttcttcaggctctaagtattccaaaatgatgcattagctccctggactctctgtgcatcagagacctaggatgtgctatttaaatcatctggcaaattgatgtgtgggggaatggaactctttcccccattttttaaaaaaaattaaattttgtaatggtggcacattgtataataagcacatatgaagattggagctatcattttggaaatgaccttaaatagaaggaggaaatgatagactcatagtaccatccaacagtgtgggttcagcctattttccattcctaccacagagctgctgggtgactctgagtaagcagtttcatccaattttactgtaagcctttgcattcctaatagaggcacaatagtattggtacctgtcttattcagagagtggcagattaagaagactttgggtgatttctaacttctagcagccgtacacacgaaaaagtctgtacaatatagtgtgtttttgtactcagatatttcatgtgatggctctattttttgaagccatagaataattcttccttaagtaaaacagcaaactagctccttgatgtcactgagtttgtgaattattttcgttcattttgattagtacataggcctcacaagctattaaggagaaaaaagaagacaggttttcttattcttattttaatgatgagatatatacagttgaaaggaattatgtaaggccgggtgtggtggctcacacctgtaatctcagcactttgggaggccaaggggggcggatcatgaggtcaggagtttgagaccagcctggccaacatggtgaaaccccatctctactaaaaatacaaagattagctgggcatggcgggcacctgtaattccagctacttgggaggctgaggcaggagaatcacttgaacccgggaggtggaggttatagtgagccgagattgtgccattgcactccagcctgggtgacagagcaagactctgactcaaaaaaaaaaaaaaattatatagctttctcaagctctcatgagaaacaggtgacgaagtgaaattttcctgcataatgtcacattggatgagaaatgtatccttatttaaaatgttacatcagggagtcatatgctttatggtgcactcatgccagcagtaacattgttgagctccatatgagacacacagcaaagtggtttaaaaattgcatagggctgtagcattcatttacacaacattcaaaacaaaacaattactgaatcaagcaagtggaaatgcagaatctaagggggtgaaaaaagattgtcttgtgtttacttcttttttaattctctcattgtcttcagttgatattcctctcagatgccagatacctgtcattgttgccagatgactggactctgctggctcatcaaggggctgtggcagtgcttgtttccatgagagctggaagaaaaactgcaatggaaaagcacacgcagtcgttcataagtagctggctgtgtaattctcagtgccctgtgttcatctgaatgtgaacttaatctgatattgcttagaactggggcttcatcaatgcaaatgactgtgcttgcaagctgaacttcaatatttgtgagcagtggcagagcactttggttaatgtgtacatattcaggtttgtagaaaaaaaatctgtgcaatttgactgtggtcagtttagttgccaggagaattggatattcctgggaaaagaaaaaaagtgtctcacttctggagccattgtaaccatgtaggtatttaagaggtttttgttttgttttgttttgttttttcaaagataaatccctttttggatgattagtcagttgatcttaaatatcatgtaattggccatgaaaattgatggaaggctctgttcttagaactgtagctccattgaaactcattctcatggtgtcatttagaaagcaccaacgtcccataggatcacatgaaaacagagtctaaaggagttatcaaaatgatacttaagaagttgaagtaagtcatcccatatctgatcttcatgatgactatcaacacttatgttagatgggcactctcattaatcctggtgttttcccatgatttctctggtgctagatctgatatgaataacttggttgcaataattataatagaagggagattgaattatatacatctttgttttatagctatacctttttttgtgctaataattttttactgtagtaacaacaaaaatcattcttttatcagcttttaaatattcgtattcataatagcacttcccttagtttatgtagccttgtttcctgagcatgtttgctgccttgattctattgttgtgcatgctcttgttctgggggagccatttaggttttgtgtatgccaaaaaaaagtctcatactcagcagttacaaaattactttccttctttatggattactttatattcaagtcctccagtcctaagtcgttgtcagcaaagattggaagcagcagtcagaagtgttctactcctttgaataactgcataaaactatagcccctcaccaaagaaaatgggttttcatgtatgacacgttgatcagcatgagattgctgctgagctggagaagagactgtgcagtgacttacttgacagcagaggtgctttttacttccttagtactcaaactgcagcatctgttccataccagaagtgagcagcttgttttccaatcaaaatggattcttctgcaattgtaccttttttggaaattaggtacactttctaacatatatgttttgaggcccttgagtatttgaaacatttcctagtctactttcccagacttaaaagatatcatgtgtgaaatatgtggaatgagaatctcaaggtgtttgggtggattcgttctacggagaatatatttgcttattgcagtttctcaataaagactttaaagtagctgagggaaaatctaaaagcacctcttcagaactgaaataatttatgtctgctggtatacatagaaccttccagagtataagctaatgagccacctcagataccacctcctttgtgaaaccttctccagcacccttaaaagaaagtagttatcctctgctctgcttttccaaagccctttgaccctctgtaaaagggcttatctcatatatgtgcctcaaattatattttttcatctctctccctatttatcatggaaatcagaaaggagattttgtcttatttatttttgtatttcccaaactactccacccagaccattgaatgtagctatagatcaggcaacaaccccaacccacctggtttcctcctgagtggtctgttcactccctgtgctctgctaggattatatgctcttaaaagcactattcacatactgtttcaacgatttgtttatatagctgtctcttctattagactgcaaattccatggggataggactaagtcctccatctgtattaacccagggcctagcataatgctgcaacacagagtactcattaatttgtattgaatgaatgttggatttattcagtgaatggtggccttgagtatatgaatgggaaatataggggctcatattccagttagcggtactgtatagtgataattcataaataacaattgtacattgtaacacacacacacacacacacacacacacacacacacacacacacacacacatacacacagtaatgctttttgtccctggaaaaccacaagtaacaatgaagtattctgctttattatgttgatatcatcatgataggaaggatatgttgcttattcactcttactttaaaacccagagatggtattctgtcatttcttagaaggttaagtagaattgatctgttatcagatagaattaaattttagagttttcattgtatctcatgatggaattgcctgttagtttgtgtcccctaggaatgtaagttccctgtgagtaggtgctataccttctatgctgaggttcctagcatagggcttggagagcatggtagatgatcaacaaatatctattgaatggaacataaaaatgaatgtatgatacaattagaaaaacccataaaaattcgttagctttaaagtgaaaattctttttaccgcttgggaagtatcactgggaccaaatggcttttaagagaaatgtagaaaccttctgaacatggcagtatttagaagctggaatatgagtttggttttgattgttccaagttcttcctttggaagatcaaacttcattcctttagaagcttaatcctttttgtgtctctatctttagcttagattctcacccagagaaatagaccttcaataaagttaatgtgaagagaagtcaattagatcgcaagaggagtttctttgcaatcaaattacctggaattttcaggtcaaacctgacagagtgtaggtttcattaaaaaggggcttataggccaggcaccagtggctcactcgtataatcccagcacttaggccaaggtggatggatcacttgaggtcaggagttcgagactagcctggccaacatggtgaaaccccatctctaccagaaaatacaaaaaatagctgggtgtggtgttacacgcctgtagccccagctacacgggaggctgaggtgggagaaccacttgaacccgggaggcagaggttgcagtgagcccaaatcatgctgctgcacttcagcctaggtgacagagtgagaccctgtctcaaaaaaaacgtgagtgggggggcttgtagatactgctctgtatctctgctctcaaatgatatgaacttggtaacagatacacagctcttactaagttagcattcataattttaatttaaactctcaagctagttttggtagctctctattttaaaagagttaacatgtagtttttcattgaaattaatttttctttactctgaaaggtaatttcctagagatgagaaggtatctagcctttttctcttcttaggagacacaaactaagccagttgcagtatcatttactactttgtatcttgctcttttttgtcatcaagggcactggtcttgcttctggaagaattcactgtgaatgagaaagccacagaaggatttagctgtaggagatcctttgcttagaggcttttattttatagatgaggagatcggctctgagatgttaacttatttgtttaaggttacacagcaagtccatagtagagcctaaactagaacctaggtctcttggctgcttgttcaagcctctttctactataccttacgagttttctttgtatactgaggtaggatgctcacttccaggcaaacactgattgctgaaactgagaaactgagaactctatgagtttagagtttggggtgacaacacagctaaaacttaaagacttacacatgtcacattattctttaactagagaataatttagtttaacatcaatttggtagtttaactacaactgctacattgtacctagtgtctggttcagtgtagataccacagggcaacagcagtgaggtgcctgtcacttaaaaggggaaattagattttcccctaaactagaaatcgataagcacagggtcacagtggaaatttacacaattttcttaaatactatgatcttgaaagaataaaagacttgactgcaaaactaaatagcagatattagtcagaaaagatgttggtcatctatagaagcatggacaagatcaaatcgcaaggtaaaggttgcctgtgcctacaagcagagtgtactccagtggttctcaaactttagtatatactttagaattaactggaggccttgttaaagtaccaattcctaggccctatccccagatgcttatggcccaagaatttgcatttctaacaggttcctagatgatagtgatgctggttggggaacaacattttgaggatcattggtctataggtgtgttagttttctactgcggtgtaaccacaaacttaacagcttaaaacaacagccatttattagctcacatttctgtagatagaaatccaggacagtatggctgagttttctattcaggctgaaatgaaatcaaggtattggttggcagtgttcttacctggagctcatagtcctcttccaagatcattccttttattggcagatttcattcctctgcagctttagaactgaagtcttgttttcttggtatcagccagggactgctctcaactcctagaggttgttctctggtccatagagggtgccttcagaggagaaaatacagtagtgtggctgactcaagtgttcctggtctatgtagcaattgattttctctgaggagattaataaatcaacattcttattatatacatcagcctctgtgaatctgcttaatgtgggtctcctcttgctgtgtttaaagattgggttttgaaactgattagctgagatttagatcctggaatgaagataaattcaccaagatgaaaaccaatgttggggaacaaactgggcagccagccctcccttttaggaatcatctctctattgctttacaactgtatttgttcttcaaaattctcattgtatagcatatcttggattaaagccatggttaaaattaaagatctcagaaattcaaacaaaatgtctaataatttttctttagccaatctcctctctttttttgtagaaattgattcttttactgaagccttgagatctctgagcattataaactttctgaactaaagtaagaatcctgaaaataaaatttcaaaggtgaaatggtggcaacttcacttcctatgggaattcctgtaaatatcagagaaaagtgcttggcagtcacagattgttgagagttatcaagtaagcctccataatctactggttcttaatgcctgatctatatggctgactttgtgtgtgtgggtgtgtgtttgtgtgtgtgtgtgtgtcttttatttaccaaattttgttttttcatcccttaggaaaagtcaggctctatttgtttgagtatcagtggctcagaggttcttttatacaaatgtatttagctaattatgtgactcaaatatccaaatttagaattattaaattcctttagagcagattgataaacaggattattgttattttattcccttgtcacattgttagagaataaaactcaatctgtatttctaaagtcagtgacaaccatatcattacattggcaaattttgtagacttaactgaaaccacatcaagcctaaaaggctgcaatgtcacttagaattttaaaagtaaactgtatactatacagctgaaaatatttaattttatagaagttaatataaaatgacttaagattttagttgtctataaaatcaaaatctgcctcagtgtcatgtgcttgtgatgtgggctttggagctgcattaacaaaagtacatgtcaagatcaaagatggacatattcgctgggtgcggtggctcacgcccgtaatccctgcactttgggaggccaaggcaggctgatcacctgaggtcaggagttcgagaccagcctgaccaacatggtgaaaccctgcctccactaaaaatacaaaaattagccaggcgtggtgtcatgcgtctataatcccagccacttgggaggctgaggcaggaaaatcgcttgaacccagtgggcggaggttgcagtgagccgagatcatgccacttcactccagcctaggtgacaaagcgaaactctatctcaaaaaaataaaaaaataaaaagatcgacatattcttcctatcgctctctgttctggtcagaccaccttttgtttgactgccatgtgttcacaaagatttttgataaatgttcatttaggagggaaccaatcagattatagattggaaatcaagtcacctgaagtacagttcaacaagctgagattacttagcctaaaaaagagaaaactttggggatatgtttaagatagacttgtttaattatataaactaaccagttaatagcatttcttattggaaggatattaaagagtttacagagtcaaagagaagaaggaagaatcaggctcagaaaggacagggaaagaacagcttaagagggctcagtaaacctggcagtcacattcttctgggcttcactgccaaagttatcacactccagcaactttcagtgtttttgttaagattcaaaactaggggatctggcttgggtcatatgttcactttttggctaaagaatggcagggaatcttgactcataatcccattaggctgcattcagtggggtagaggtaattttcctcaaagatttggggtgctattatcaaaatagtaaggaaatatatgctgtacagacaaaaagtaatgaatatccacaaaggttatgtgatcataatctttgaatattggaaagaggaagatgagccttggtaaggatgtaaggcaatagttggaatatccatggaggcatatgtgtttcaacatcaggaagaacattctaacaattagagctcttaacaggctgtattgtgagttatggacttcttattcatagtaggatattcttttcattgcatgtggtggaaacgtgacttgaactagcttggtaaaaagaggaaattagtggaaagatattaggaatgtctcatgtgaacaaagaaaggattgaacagccaaactgtggagagggcaggcatcccactgggccccagaaactgctagaaccagagactcaaatgcagctttccttatttctctttctttcatctctgcttctctcagagtattagctcattttccctctgcagacttactctctcatgcacattatgtgaaacatgattgctaagcatgcctgggttatacatctcccaacaatcaagagaaactctctctagcacatttagtgagaaaaaccttggaaaaattctctggtccaggttgggccaagtgcccaattctgaacaaatcaaccaaggccaaggggcaggacccctagtttggttccagtgccttctctggactgatctcgggatggaaaaaattggctcttaggagaactataattgagaaaagcagttcacagaaaaaagagggatgctttttccagaaaagaatgtggggggcaggcaatatagtaattgcatgtattcaaaggttagctcaatcagaaatattagagaaatgaatcttatgttggtgggaatttgaactggaagaacttgaagttctttccaactcagagatgatgtgattctagctgtttttcaggtaaggcaggcacatattggtttatactaggaattttctttttccacgtatttctactcaaggattactctgtttggaaactgaggaatatttattcagctgtttttgaatttgaggatagaggaaaatgttttattttctaaaaatgaatgtctggtagaagagaagtcatgtatgctttttaaaaaatggaacctgtggctttaaagtcacattaccttcaaagacagtactcttaaatctgaatgatttttttttctttttgagacgaagtctcactgtgttgcccaggctggagtgcagtggcgtgatcttggcttactgcaacctccacttcccgggttcaagcgattctcctgcctcggcctcctgagtagctgggactacaggcgcacaccaccacgcctggctaatttttgtatttttttagtagagacggagtttcaccatattggccaggctggtctcgaactcctgacctcgtgatcctcccgccttagcctcccaaagtgctgggattacaggcatgagccaccatgcctggccaaatctgaatgatttttttaagattattttggcttgttaagaaaacttttttttttaaataattatatattcatagcaaggtacaaagaaatgtacagcgaggtcatatatatccttcacccagccttccccagtgttgacatattccatggctcaagtacagtatcaaaacctggaaaccaatatgggtacaacccataaaacttatttcaccagtaatgcatgcattcatttttgtgtgtcatcatgcgtagctttgaataaccactagcatccatcaaaatgcctcactgtattatcagaagcctctcgtgccacatcctgctagccacacccaccccatctcatattccctaacctctggtaaccgtgaatctgttctccatctctgtaatcatgttatttcacaaatattacataaatgaaattatacagtatgtagccttttgtaattggctttttccacttttcttatggttcatccaagtggttatgtgtatatagaattcatttatttttattgctgagtagtattttgttgtatggatgtaccatagtttgtttaactattcacccttttaaggatatttggatagttttcagtttgggactattatgaataaagctgctctgaaccttcatgtacaaatttctatgagaaaagttttcatttctctgggatatgtatcaaagagtacaatcctgggttgtatagtaaatctatttttagttttaaaaggaactatcagactgttttccagaatggcgattccattttacatttccaccagcagtgtatgagtgatccaaaatcatttagcgttatcattaatttttaaatgccatttttgataggtgatagtaatattgtgattttaatttacatttttctaatgactaattgatgttaaacatattttcatgtgtttacttgccatctatatatcccgcttgagtgaaaggatgtctgtgtatattttttgctaattttctaattgggttatttgatttttttaatgttgaattttgggaatcctcttcgcattctagatacaagttctttgtctgatatatggtttacaaatattttctcccattctgtaaactaccttttcatcctgttaacagggtttttgcagagcaaaggttttacattttgatgaagatgattttatgttatttttatgattaatattttaaggaatgaagtatacattttgcatactttttattgatcttaagaattttaaattgccaaattacctgctctaccttctttttcagctcagacgtgttaccaatgcagatgcagttaaattttaagatgagtaaaaccattgagtacatagtgtttaagtgtagtggaatgtctgtgtgttctactctattctaatacctgcttttctctagtgttttaattaatgtagcaaaggaagatctcactttctgaggtagtttcattttgagtttcagcaagatttaataacaccggaaagaggacatgtgattctacttgtacaatggattattgtaaataaacacctcatattactaatatttttctttctacacaatcccaaccatattagacagtgcagcaacgtcccatgttgctttgtttatataaatttagcctttagcttttccttttggcagcccatttgttcattccagaaatactgcacacctaccagctttgtcaagattgtgctgggttcagggttataatggggaatagtatacacatagacataggttctgccctcatggagcttacaatttggttctcatttcttattatggtaagcttgtattgcctgtcagtatttcactgatttgattgaatatccttacttcccatcttctgtcacagaatcttcctcattcatccaaaacgcaacatgtccaaatcttagtgaatgctttcagtgctttgggagtggttacattccattaagattaaatccaagccaagcaagtaatacttacaagcatgcacaggagaatatgagatgaggagagaaatcctcatacttagttaatttcttgccaagtagagaaattttcagtagagccttaagttacctcagggatggctgaagattctaaatatgagattccaaagtccaccgttcaccatattctataaaaagagactcagccatttgaacaagctagctaatcagatgccctctgcatagttcatatttttaaaaatcttggtccttatattatttataaaaaaagtgactctatattagttttaaggtataaatgagacacttttcctatctgtaaactagctgatctatttgtagtctggcttaaaatgtgacttgcccaaacataggaaaatcttccaaaacaggatctagactgtgtaattaaaaatcaaaattagttaagaatcaaacgtctgaattgaaaatttaatttttagttaaattatttgctatccagtcatctttaatattttgttttgctgtgagcagggtcacatatgacaaattaaaggtggatcaggccgggcacagtggctcacacctgtaatcccagcactttgggaggccaaggcgggcgggtggatcacgaggtcaagagatcgagaccatcctgtccaacatggtgaaaccccatctctactaaaaatacaaaaattagctgagcatggtggcacatgcctggagtcccagctacttgggaggctgaggcaggagaatcgcttgaacccgggaggcagaggttgcagtgagctgagatcacaccactgcactgtagtgtggtgacaaatgagactccatctcaaaaaaaaaaaaaaaaaaaaaaaaaagaagtagaccagccatacttttaaaagcttattgtaacaaacacatactgcttattccatgctggtgtgttttgtgttctttgcaaatgttaactaattaaatcctgacaataaacctattaagatagatattattaacctcattttacagatgatgaaactgagacagagggagactagataacatgcccaaggtcatacagttaataagtggcagaaccagggttcaaaaccagtccagaggctatgctcttaaccactatacaatggtcccatattgtagttaatcaggtatttttccatataacacaataaaagcattgaactgggattttcctatatttgagaaaacagtatggaaataacagatggaggtatagaagtttttgataagctaggcatgttggctcatgcctgtaatcccagcactttgggaggccgaggagggtagatcacttaaggtcaggagttcgagagcagcctagccaacatggtaaaactctgcctctactaaaaatacaaaaattggcctggcgtgatggcacacgcttataatcccagctagtcgggaggctgaggcaggagaatcacatgaacccgggaggcggaggttgcagtgagccgagaccacgccactgcactcctgatagaaggaaaactggacctaaggatttgagttttgacattactagtacaagctgtgtgtaactttggggaaggctgctacattagtttcagtttcctattgctatggtaagaaattactacagatttaagttacataaaacaacccaaatttattattttatagttcttgagaattttaaaatcaaagtgttctttaatgactacaaaagctaatacactgttaacctctttccaattctattaataccatcattatctttaatagttgcatggaatccacatggaatgcaccataaatgaatcgaaatcttatgttgaacatttgtttactgtcttttgccattataaacaatattatgatgaacatccctaaatatatgcctttgaatacttgttcaattttattcattggggcaaaaaggtatgcacattttaaagaactacagtccacaggtgttcatgcaattgctgagggttttctgagaaggtgaacaagagcagtctatttcaaaactactgaagccctttttgcatgactgactggcattccctaactgggccttcttcgttgccctgacactgcctgttgctgctcctctgagaaggaatgtgtattcacagatgaggcgctccattagtcatggtgcatttcctgggccctggagacatgggcatgacatcaccaagggccaatgagaaaggattctctgtagcaagctctcaaaactctttagaggattgtagactgtgtgttctgttcctagccctcagggtgtgatttgagcttgccttgctcatccagccatagtctgggcacaaaagtctagcttacagacccaagaagccaggacaagcttgaaaatctgcagagctgcaggcagattcccatttagtattttttttttccagggctcaggttgttattcccagagttttccactcctaatgatgttgttacttcatgtggtaatgggtgggtggtgaaagatgaagtctgcattaaataaaagacatttggcagttaaaatttctgggtaagtataggttggtagcataacaaaatcagaagtacattttaccgttttgttacattgcttttgtgtgtagtttcacataataaaacaacatcttttaacagcaaaggctcctagcaaaatgagtgtggcttaaaatagggcaattaccaaagaactttactgaggggattagtaactcattaaatcttttctcttcaaggagaaaagaaacttaaaaaaaaattctcttttcttgggttttaagcattttggataaaaacttttctgtctttctctgtatctgtctctctctctgctccctaatttatgtatttatttatgaaaatgatttgtggaatttagtcagggataactttgttaattctgcacaccaggaagtctattgaaagacttatttcctaattggcccaatcttttgctaacaaggtataattgtaaaattatctttttaaaaaatagtcaaggaaattaaggctcaaaactcaatgtgagcttacactgaacagacttttatagcttaactcagtagttgaacctaagagctgtgcttttctatcttcattcaatctatgattgaatgagaatggttcttttagtattttttcatgtttaattcctttttgatgaagtcaaagagaaattgggaaaagtagccatctttattagtgtgttatctgtggatgccatatactatggaagaacctgcctctaccacttttaaaaaaatgtttctgcaagataaagatgatttttttttgtaattatagcagcttttatttttaaaaatcacttgaaaccgcatgaatttatccttatttcctaacatatataccagtaattaaaggactttcctctagaactataacatactataagacagggcacttttcaacacttcagagatcctccttcaaagatctctgtgcaattcaaaacatttattactaaaatttcaaaacatctctggagatattctaaatggttttttttttttggcttgtatagatgagaaagttgaggtacagaaagattgaaccttgtactttgtgtcagtcatagaagcagatactgcatacataaatcattcttttatcaaaactcttaagaggacagttctttgtgtctttgtataaaattgttcttgttttcctttgacagcttcaggctttgccttattaacagcagtgcttatttttcaaaaccctttgattgagacaaaaaaaaaagcaggttcatctagcctaggcagaactggaagaagccctgaaagggataaattacctaaggggtggcagtgtggggcatgggagcactcccactgcctcactcttagcagagtacttgattcttctcaatcccatcccacaatttctcccacctgaaccaatatttgccagttttctactcgagggttgccatgactcctgatgagttaatattggtaaaacactttaagcctttggaaaaaggtctcataaaagtgtacaattggcactggccctgatagtagtcacaggctttttgagtgggcactaggcaccctcagataaggttaaccagatccctgtttttggcgaggacaggctctagaatgaggtctgctgctgccatcttgagagaacacatctggtttgaaacgttgaaagccaggtgacccttgaagcagccacacagtaatgtctcctcactgcttctgcttcctgctaatttggggagcagcaggtgcctccctgagaaaccctgccagagggttggcatgccatgctgatcgtctcattaagccctaaactttttctacagaagaaaactctcaaaaggcgattccagaatatgacagagagaggtcatgacagataatcagatcagtttataaaaagttaaggatgagtcatgtcactcctaaaggagttggcatcaatttattacacaagaccaaacactgaaggaagaaaagcctttagtctcattaaggagcccagacaaaaatcccacttaatccatcttgcttttccttttcctgcaactcagctggtgtgcaggtgtagggcagcttggcagaagatttgaacgtttggaaaagggagtcattactgaaagtcactgacacacacttcccttggaatgctgctgatgtcatggaaaaccaggaccttagcaataacccctaacaaccacagctacagtaaacagtaaatgttacctccaccaaggcattggtttttaaagagttttaacaggccagggcttgccagccacaactcataaaaatgttcttataattttaccctactctctaaaagtgctggataactgctgaggtttctctgccacttgggatgcaaagccaaattcacgtcactttcaaggttcactaatcagaatttacagcatttcttttgcagtcctcttcataccccctgccatgctcacagagttaggtctggtagatttcatactttttcaaagaagtctcttgtcttactgagttgtctcaatttctggtgatggtgtgaattaatgtgccaggttttgactagtgttttattagtctagaggttaggcaaatctggttaattgatagcactcaatctataggttatattccaatcaatttgaaacaaccgggcaaagtggcattctatagttcaaactctgaactgggtattgtcaaggtgaccatataatttatcatcaaaactaggatatttttgaaagtaaaggggctctattaataattactctgagataacagcaataaaccgggactgtcgaagcaagttgagcatagggtcacccttgttactgtgccaagagtcaccatctagctgtcatttattaagtcagacattgaagaaacttgcaggaatgcagaacagtgccactcttctcatgaacattttttgttttagaaaatctagtcattctcataaaaatgttatttatgataagatgttatgagtttattagtgttagttttaaatgaattaaataaatgctttaaaattcatctattttaatttctaatatggtaaatataatcctcccaagtaaaagctctataggtcttcaataatttttatattcttaaagggaacccaagactaaaagttttgagaattgctgctttttctctgcatgggaaagaatatactactaaagcaaaatgataaattccctggcaagagagaccagcttaatcatgattgcatctgctacagcactagcaaaatgtcctgcatatagttagtattctgtaatacataaatatgagtagacaaatctcgtgtgacaacgctgaaaagttgctgtgttttctgacgtttgggtattacattaacattattatttggtttaagtctttgttttttgatattcagtatgtttggtactctttgttaatcttatttcgacacaacaatgatgatgtcatttttccttcgaaagttttatgggatagatcaaatttcctatgaaatgagtatgttagataagaaaacataaagcataataaaagtaggactcctttcttttaacctgcctaactcatgtttatcctttatctcaggtgtcatcttcttcatttggccttcctagaccttcccaggctggtctgcagcccctcccatgtgctttcaaagtaccttttatcacaagacttatgactcagggtcattccattcatatgttggtttccccagttaattttgagtgcttttatgtcagaagcatcctttaatttccttattcccagaattaaatgatgcttggtaaagctattaaagactatctgttacactgaaatgaatataaagaaggaaaaactagttaatttaacttttactagttaatgaagtgttttttttttaaatgtcatatgacatgatttctatagtactggaagaaaaaattttttagagtaaaggaaaccacagtttgaggaaagaagatagattgctttgttatgaccttacatgcagattgatttacatctacctacccctccactctcaaactccttttcagagttagactcttttaagccctttaagggttacgtatttctgagtatgtgatttctgtcaatatcagaaattatttccattggcaaaaaaagttatgaaatgatttctataatataggtttacttttgttgcaagtaacttttcattctttatgtttttctttctttcaaatgaaaatattatcttctatatttaaatttgttccttgagttagaaatataatattttaaatccatgcttaatttaatttagaagacatctccaaggcctaaaattgacttgctgttttgtaaatcaacatgacaggataaacagaggccatagtttatttgggaagcagcatgatcgtcatgatttaataatagtgataattatatgtaataagtaaaagtaggaatctaagttttatgaagatggtttttaatgccatgtgttttgcttggttttagtttgggtcttttctctgagtgctgttctgtgcctccacatttgtttctctttttggagaccacacattttggataattacttaccaaacttatatgcaaattattgatgagagtcagaacacatcacagtttttatcaagtctccactaaaaaaggggttgggggcttgcagtgagctgagatggcaccactgcactccagcctgggcgacagagcaagactctgtctcaaggaaaaaaaaaaggcgcggagggcgagggggtggggggggagttattatgctgtctgagatggagtcctaaaggaacactgtgatttctgtggacaggtgactggctggatggggatgagagagctgggtacttgtcccaactttgccactttctaagttttggtgtgtttttagcatgtcaccttacttctcttagctgctattagtgtccccatctgtaaaatcagtctgatcaggctgggttagatgatctccaaggtcttttacaaatcatctaattctatagcttgtgtagtcttctgtcaggatttcttgttcttgaagtccctagttgacagataatggtgtggaaggaaatgatacatggcagagtcctgaatgaccaaaatggactttgtccacacttatgtgctaatctccaaagaagaagaaaatacaaatgggccagcggccaaacatgaaaatggtgacagtgagcaaaacattgaagcagacagctgaaagcttcatttcctggcccggctgccatgagaaatgctgtgcttgccaaacccttcaggctgtcaaggccagaactttggctagctcttattttgagctccccccataccacacacacaaaccacacaggaaaattgtctctctccctttatatttgtgccttttggctacacttctatttatgccaagtccttgcctaatctccttccttccagctgtcactatactctgcctgttgctttctgggggctttgaaaagcagctgcaaccttcagaggaagcgcagggtggttggcattggtggaagggtattgtaagtgtgtgtggactctatcagaaccaaccgtcacttttacctggtttatggacagtccaaacagtgttctcactctctttccttggcaaatgttagaactgatggctttatttttttctccctcccttcatcttcagggattttttttttctcttctacattactcagcctttttgtctgtgaacatcctgtggaagatttcatttatcttaggttctttggccaggctgctcatcatcttttttttccacataaaacatatttacctaatgagagaacttaagatggataaccagagcctctgtactctctcacaagcctagaaatttgacactttctcaattctgacagttcatcccaaaccattggcctcctaaggcccagagagctcttggtcatttgctgtctgtctagccccagctgttggagaactagcttaggtgtactttcacccctggcctgtgttgtttccccacagagcttgtctgcatatgtctcatattggctcttagtgagggcggctgagcaaagaggcacttggttgtcatcattttagaaaatcaaggaagaatctcaggaagcctgattgaagaatcttggctcaatataggggaacaccatgtactatgaaggttttaagttattgcgcttgcacagactgactttgtggccttaatatggaaagcaaaacaagattaaaatctcacacagtcattgtcttttgtagtagagcattgtcttttgttgatgagtagagctttttgagatacaatgagttgttctctgctgctctttctggaaacttcgttaactatcttgccctatacctggcagtgccaacccacatttctgtttatataaaaggaactccatatcctcttcagaagctagtaaacaaaaaaacctcaaagcatatctgtattggggtttgtctatgttttctcatgtctgtattttgtgttttatttaaaataattaaaatgttaattgattttaacttcaaacagatgaatttgtttgctaaaattctttttttgatgggatcttgtttacctttttgtatactatataaagtcttttttattcatattgggaagataacactacaaagccatttttttccatttctgcctgtataatttcctcaatctttgacttgcttggctatattgtttcaaatacccagttaacctttttattactcatttccttattacatgcttttgcattgtctacaattcatagaatcagtatggtaaaacattagagctggaaaagccattaaatattaactatccaaactccctattttatattaatagatgagaaaaagcctgcagaaggaacatgattagaccaaggtcacacacatgccacagccaggctgacaagtcttctgacccattgtctagtggttttccattataacacctgtgctccatgtgtcaggaattttccaaagcactagtgagaactccatcagagactgcatcctactggaaagggcacaggctttggagctggatagatctgggtttgaatatcttgttctgccacctacgggcggggtacattaggcaaggaaccaaagcttttggggacttgttttttcctctgttatatggcaaaagtaacaagaatactttatggttattgtgggtattaaattatataacctacattaaagtacctgttacacatattatgtttaataagttattataaaaatctgctgttcacagaaaaatgtgatatgtgtaaataataacttaaaataggtatttcattattgggtattctgagcctctcttgttcagtagtattttcttgaagtcagtattaatatgtgaattgagtgaattgtctggaaatgaattactgaaagttatttatatcttgattgtgattcatacatttcccttttctttatggctttcctctgtacttagctgcagtgcatctgcatcctatccaagaacttttgtacaagttgaactcacccaaagaagacatttggagagtacttgggtttggcccctgcttttcatctggctaaacactattagataaatctagaatatatagtctatgtagaatattatgtttacatttttagaaactttggatttttagtgtttttctgaaacttactgaactatgtgatgaacagcttcagtgtgaaattatacgtacttggtctgagtataggtagaagttatgttcaatataaaggggcccaggactgttgttaaaaggaataaggactacattatttaactagtagtgtggggaggtggaatgagttaggaaacaaaagctaagatggatttagcaaaggccagagcaagaaaagaaagtttaggctgggcgtggtggcacatgcctataatcctagcgctttgggaggccttggtgggcggaatgcctgagctcaggagtttgagaccagcttgggcaacgtggtgaaaccccatctctactaaaaatacaaaaaattagtggatatgatgacgtgcacctgtagtcccagctactcaggaggctgaggcaggagaattgctcgaaccaagatggcgccactgcactccagcctgggcaacagactgagactctgtttcccccccacggccccctcccccacaaaaaagtttagaatcgtcgcaggaggtgactcaggggaatttcatttaagggcctctcaaattgcttgggtgttgttggcttactggaatgccttgagtttgaattagagggaaggaccttaaggaactagacagaattttgcttctctattagaggaccctggcttaggttttaaacggaagttaagtgcaattagaaagaggcactatgtacctaacacgtagtggatccttcatatgaaaccattaattgtcaggggactttgaggctcatataatttggcccataattatggctacataagtaaaagctgtgaacactcttagggttttttttaaattgttttttcagtaaaggtgaaagtatagcagtgttgggagggggtgttccttgtgcctatttgtacacaatgtcttagattagattaagagccttaggccaatgattgcttaaagataaaaagcaggcatgattctggagggatattggataatcaaatatgaccaggaaatagaaggtcctattttgctgtattttgggttcatccagatgggatcagaccagaggaatttggcaagcattgagactcgccacttagaaccacactgaaatagttgtggtggcaaaagaatttctccgggagtcttattccacttgaggcataacagccagagattcctggcctttgaggggagagtgccaaagttgatgtattttaaaaacatcaactgagatctataaacctacgagaaatagttgaattggatgacactgggactatgtgtttctgtacttttcttacagaagacatactatgaatacatgtgtcctggaatctacttttaaaaattagttctatgctcatatcctcacattgagatttaatgtatttcagtttaataaatgagaacatataaaataatttacctgtaaggacctgtctatgggaacttctatattctgcttgaaattctgacacattaacctggccatttccaaaaactttctggcaagagctcttcatggacctaataattgctttactgtttaatcattccctgagcctttttatactctagtaaactgcatctgtcactagatttcatcaccatctgtattatttatcccttgtaatctgatatctatctctataatgcccaattgtatccccttcaagtgcccacttcattggcttatatacattaggttttcaataaatatttttatataatggtaaatgaagaagttgttctttatattttaaacaactcttacggaaggagattacaacacagctggaaggaattattgtgagagtgaaacatggaaccaaaaaagataaagcaagggaaattaaaaaaaaaaaaagagctttattgagttataactgacatccaataaacagcacatatttagtccaatttgatgttttaacatatttacatacccattagatcatcaccacactcaagataattaacatgtcttttatccttaaatgtttctacatgacctttgcaatccatgtctcttacccttccttaccttaccctcataagcaaaacactgatctgtttttgtcacaatagattatattacattttctagagttccttattaatggatcatacagtataaactcattttggtcttgcttttttactccaatttattttgagattcatccatgttgttgcatgtatcagtacttcattactttttcctgcaaagtagttttccactgtatgtatatactacatttgcttatccattcatctgttgatggatattttgggttctttctagtttatggctattacaaataaatctactatgaacatttgactacaaatttttgaaaagaggtatgctttcttttttattgggcaaatacctaggagtggaatcactagattataggattgctgtatgttcagctttgtaagaaactgccaaactgtctgtaccattttgctttctcaccagcaatgaatgagagttcctgttgcttcacatccttgccagcatttggcgatgtcattgctttggattttagtcattctgatacagatgttccccaacttacaatggtttgacttacacttttttgatttttcaatggtgtgaaagcaatatgcatgcagtagaaactatactttaaattttgaatgttgatcttttcctgggctagtgatatgtgttacgatactctctcgtgatactgtgcagtaacagtaagccccaagtcccagtcagccatgtggtcaaagggtaaacaatcagtactgtgcagtgtactcttcaataaattgtatgagttatttggcactttattataacataggctttgcattagatgattttgtccaactgtaggctaatggaagtgttctgagcatgtttaagataggctaagccaagtaagatatgatgttctgtaggttaggtatattacatttatttttgacttatgagttttcaatttacaaagaacttattgagtcataaccccactgtaagttgaggaggatctgcaggtgtgtagtggtatctgtgttacttctttgaagaagtgtctgttcagatcttttactcatttttaaaatcagattgtttgttttcttattgctgttttaagagtcctgtggatgcaagtcctttatcagataggtgttttgtaaaaattttctcccaatatttggtttgtctattcattatcttaacagtgtctttgtcagagcagaagcttttaattttaatgaagcctaacatcaatttttttttcatggattgtgctttaagtgttatattcaaactcattgccaagcccaagatcacctagatttttttctatgttatcgtctggaatttttatagtttgcattgtatatttacttctatgatccactttgagttaatctttctgaaaggtgtaaggtcagtgtttagactgatgtgaatgactatttggtccagcatcgtttgttgaaaagactatccttctgcattgaattgactttgcttctttgtcaaggttcatttaactatatttatgtgagtctgtttctgggctctattttgttctatttatctagttatctatattttcaccaatatcacattgtcttgattactgtagctttgtgaatgtatgcatgtattcatttaagagatgaggtcccactatgtggctcaggatggagtgcagtggctattcatgggcttgatcccacttctgatcagcatgggagttttggagtgctccagttccaatctaggccagtttattcctctttaggcaacctggttggttccctgctttcagcatattgatgctgaactaaatgtggacatccaattggcatagcacacaacagcccagaactcctgtactcaagcagtctttctgctttagcctcccaatagctgggactacaagtgcatgccaccatgcctgtcagattactgtagctttatagtaagtcttgaagttgaagactttttttttttttgagacagagtttcactcttgttatccatgctggagtgcaatggtgcaatctcagctcactgcaacctccacctcccaggttcaagcaattctcctgcctcagcctcccaagtagttgggattacaggtatgcgccaccacgcccagctaattttgtatttttaacaagagacagggtttcaccatgttggtcaggctagtctcaaactcctgactcaggtgatccacccaccttggcctcacaaagtgttgggattactggcatcagccaccgtgcccagcctgaagacttttatttctccaactttgtttttctttgtcagtattatgttggctattagtttgtttcctttctagataaactttagaatttgtccatatccataaagtaacttgtttggattttgattgagattgcaccaaatttatggattaagttgggaagaactgacttcttaacaatattgagtcttcttatccatgaacatagaatatttctccacttatttagatcttctttgatttctttcatgaaagttttataattttcttacataggtcttgtacatattttgtttggtttatacctaagtatttcccttttgttgatgctagtctaaatggtattgtgtttttaatttcaaattccaattgctcattgctagtatataactaagcaattgacttatgtacattaaccttatatcttatttgtttttggatttgtgtttttatgattccatttacctctactattgttctattagctgtaactccttgtgtagttattttagtgatggccataggatttgacagtatatatctttaacttatcacagtctatcttgaagtgatattataccactttacatacagtataagaaccttacgatagtcttaaagtagttgtcatacattttacttacacataaatatactttagttataaatcccacactgagttttattttagtcaattatctgtaaaatatattttgataataagaaaataaatttaataaatatatattacccagtggttaccatttcctgtgatctttcctttgtatagactgatttactgaatgagatttacctgaagaattttctctatcaggtcttgtggtgtaggtctccttgtgatgaattattttagcttttgtttatctgagaggtctttattttacctttgtttttgaaagatatctttgttgggtatagaattctagattgatagatttttttcttttagctttttgtagttattgctttattgtattttgacttttattgtttctgactagaaactgtgcttatccttatctttgttcctctgcatatatatataatttttttaatcttgttgtttttgagattttcttttctcttcgattttgagaaattgattgtgatgtgcctttgtgtccttttctttgctttttatgcttggggttttcttgagctttttttgatatgtttgtttagcattttcatcaaatttggaaaaatcttggccactatgttttcaaatatttttcttctctctctaccttctcatctttggggtctcttactacacatatataaagctaactgaaattgtcccacagctcactaatgtcccacagctccattcatttttcttggttttttgtgtgtgtgtgtgtgtgtttcagtttgcatagtttctattgttatgccttcaagttctctaatcatctcttttgcaatgtttaatctaccattaattctatccagtgtatttgtcacctcagacattgtagtgtttaccactagaaatttgatttgggtatttttagtatttctattgacttttcaaacatggactatagttataaagactttttttttttttttttttttttttttttttttttttgagatggagtttcactcttgttgcccaggctggagtgcaatggcatgatcttggctcaccacaacctccgcctcctgggttcaagtgattctcctgccccagcctcctgagtagctgggattacaggcatgcgccaccatgcctggctaattttttgtatttttactagagacggggtttctccatttggtcaggctggtttcgaactccagacctcaggtgatctgcccaccttggcctcccaaagtgctgggattgcaggcgtgaaccaccatgcccagccataaagactattttaatgttctcgtgttatgtagctttgaaatgattccagacacataatttgctgcatgaatgataaaagttttgctgtggtaagaacacagagtgtaatcttcctccccatggaaatgttatatcacaccttatcagaccacatatatgaactcatatatgtcctcaactactggactctaaaacacatataaacccaagattttgacagatacgttgagaatgtaggctgtggcagggctactctctgttagcctttgagttattcttttgagcctggccagccaacatcagcaccacttgctagtgttgagggacttttcatgttgttgtggatccccattgtgttggtcaaatcatcactccctagaatctcttgtaaaaagatacgcctcagatgttgttttttgtttgtttttgcttttttaacttaacaaattggtaattgttttaacttttttattaggttcaggggtacatgtgcagttttgttatatagggaaattcgtatcacagggttggttgtacagattatttcattacctaggtactaagcttagtacccaatcttttttttttttttagctcctccctcctcccactctcttccttcaagtaggctccagtgtctgttgttctcctctttgtgtccatcagttttcatcatttagctcctactgataagtgagaacatgtgatttgattttctttttctgtgttagttcactaaggataatggcctccagctccatccatggtcccacaaaagacatgatttcattcctttttatggctgtgtagtattccatagtgtatatatatcacattttctttttccagtctgccatttatgggcatttaggttgattccatgtccttgctattatgaatagtgctgcaatgaacatacatgtgctatgtctttatggtagaatgatttatattcctttgggtatatacccagtagtagtattgctgggtcaatatctttaagtgttactgtgccactttacgtatagtataagaaccttaacaatagtcttacagtacttgtcatacatttaaatatacattagttataaatcccacactcgattttgttttagtcaattatctgtaaaatatattttgataataagaaataaatataataaataaatttgaattatccagtggttatcctttccagtgatctttcctttgtacacattgatttactgaatggtagtgctatttttagctctttgaggaattttcacactgctttccacaatggttgaactaatttgcattcccaccagcagtgtataagtgtttcctgttctcctcaacctctctagcatctgttagtttttgactttataataatagccattctgacttgtgtgagatattatctcattgtggttttgatttgcatttctctaatgatcagtgatattgagcttttttcatatgctcgttggccatatatatgtctttttttgaaaagtgtctattcatgtcctttttaatggggttgtttttttcttgtaaattcatttacatttcttatatatgccggatattagacatttgtcagatgcatagttttatgcctcaaactttgactagactttgtattcatggcggcctacttccaccctaattgggcaaatagactttaataattagactctaaatgaaatggaaactcacacactatgaggttagtgtatctcatttattgagtgtattccctaagagatttgttctcattattctccacctgtttaagcattgtgggggagaaaagaatctctttgtcaataagccatgtgattcatgagtcgtattttaatcgtcttcttattttaactatacaaagcaccttgtctgctaactctagtatctgtgtcagttctgagttaatttcaattggttgatttttctcctcactgtgagttgtattttcttgcttgttttgcatgcctggttatctttgattagataccagacattgtgaatttcacctttttgggtgcaagatatttgtattcctataaattttaaactttgttttgggatgcagttaagttacttggaaacacatccttttggatcttgctttcaggatttgttttggcagaactatttaatttaaagctaatcattccccaccatcaaggcaagacccgtctgagtattctatccaatgcttcatgcattatgaagttttccattcttattcgtaaaaataggcattattcttggtcctgtatgagtgccaggcactctaccctctactcctctcagagcattctttctctagcctcaggcagtttccttacatgcatgcactaatcagtactctgatgaatatttgagggagactctctaagatctcttctgtgaactttagctgtcttcttttctctgaattttcagctccttctcctcacttcagggagcctgttggattccacctgtgttccctcttcatgcaacacaacctagaaattctcttaaggtaatggcctgaggaaattgtagaactttccttttttttttttttccctcatctcttaccagatgtccagtgtcttgaaaagacattgttctgtttgttttgtttcttgaaaagtattgttggttgttttaggtggtagggtaaatctggtccctgttacttaatctttgtcaaaagcaaaagtgctcagagatcttcctttaagttttcattggtagttctagaaatgaccaatcacaaaacagggaatctctaactgaaagatccatgacatttcattatagagagttaggaaagagaattaatctgagaattaccattatctagtcttcctcccactcatattcttcataaacatttgcataacacaattttttgtaccattgttgaccatatcaatgggtagattactgaattttggggggaaagacatgtacaagctactagaatggtaagttttgttgaacatgttatataaaaggaaattacgcaaggggagctgggttggtatcatagtatagtattatatttcttttttttttttttgaggtggagtctcgctctattgcccaggctggagtgcagtggcgtgatctcagctcactgcaagctccgcctcccgggttcacgccattctcctgcctcagcctcccaagtagctgggactacaggtgcccgccaccatgcccagctaattttttgtattttttagtagagacggggtttcaccatgttggccaggatggtctcgatctcttgatctcatgatccacccgcctcggcctcccaaagtgctgagattacaggcatgagccaccgcgcccggcctatatttctttatagaggtaaaataggtgtgagatttttgtttttacttattttgctttgttatttgggcttcactggggaaccaagtgatttttggcaagagaagaagcacaaaaaatacagaaaagcctcttcttatggttcctataatggcaaccaagtcaataaatggttgcaaaattcaactagattgcgatagggtagttactgctactgctttatccttttataaatagtcagtttgaaaagtagaaaagttcatgggtaaagagcagtagctagaatgcaaatgtgaatccaggatgcaatatacaaaggtttttgcagttttcagcaagtgtgaagaatttctgattgatgaggccctcagagcagaaagagaccctcctctgtctatgtgtaagattagtaacacatagagacgtggtgttcatctgcccagtttatgtggctaattagcatttagagtttcttcaatagaagctagtgaagtaagaactagataatatcttggaagatctttttgtttcttctgtcttgcactttgaagaggggctcagactgttgaattggaatagaacaattaaacagactgtaaaatgaagtcctgacatgctggttgctttgcctgctctgtcagagcagcactggttccagggagagagaatactagttttgtttatttgtttgtttccagacaatttgctatgtcatcactttttttgtgtgtgcatgcgccaagtgtttgaggttgataatgttgacagagtccttgcagaatggaagttcatctccacagggaaaggctttgtatttcaagttttaaaattccaaaatattttgctataacattgttattcctagttttttatgcctttttgtgtggaaggttggtttctcctttatctacttaccagcttttaggggaatccctttttaagtcaagaaagcaccttagaaaatttctctctctctctctctctctctctctctctctctctctctgcctttatgaaactgacagtagcatatcttgctattcttgggtcttagtttggaattaagctgtgcatgcagtatgcccagaaggctcagtttttaaaaaatttctatgtttattcgtatttaacttcattctaatggggtcatgtacactgtgatatttattcatgaaatatttaggaaaagataaaatgtttgaactataatgaattatgattttattatccttttattaatgataatacacccaatgctattcttgaaagtttgaaaatggaaaccttggtaaattttttttcttttggcagaattttgaacttttttacataaaagtgtaaacctttgtttggtattatgggtcacctggttccatagcatctctttgatttaaagaggatatcatccatttaaaaaggactcacagccaggcatggtgcctcatgcctataatcctagcattttgggaggctgaagtaggcagatgcttgagctcaggagttcgagaccagcctgggcaacatggtgaaacgctgtctctacaaaaaatacaaaaattagccaggtgtggtggcatgcacctgtggtccaagctacctgggagactgaggtgggaagactgcttgagcctgggtggttgagtcagcagtgaaccatgattacaccactgcactccagcctagttgacagagcaagagcctatctcaaaaacaaaataagcaaaagggacttactttggggatttggagaactagaaaatattattattcatattaacttacacccataaaagagtgctattaaaagttcacttaatacaagggcttctttttctttgctttggatttaaacaggttttctataagctaatcaacagagatttgattaacatacttaagcatgttatatgaaagggatggcattgtgaaagatggggatactatatagaagtaataaaataaaaggtatggaattaggtagtgtaagaatttcagaactaaaatagtctgagaagtcatttggaacatggatttcttttgacagaaaacttctgtcctgcagtatatcagccttgtccagcagagctggttagtgcagatagaagaacctaggttgcttaactaccagttcactgtcctttctattatattgtaattctgttttctgtcttatttcagaagcagcaatccagatgagctctacatcctgaataaaaacaataataatggcaataacaaactattatttttttaagaaatatgacttaaacctatttgtttttatttatttggtttgtttgtttatttatatgtagtttgtcagaaaaccataggagtcaggcattgggtagctcgtggccattagtattattttcaaagtcagaaatcattggagaagaatccccttctaatataaatttttaaactattcatctgagtgtttaggaagctgtgatctctgctgtgataatcctagaagacattgctcaagccacagctggctattattgagactatggaaagagaaagagcttttgccctgatttatcccataaaatgaataataggccacattcagggagacctagcttgtggcagactattctcaccacacccttcacacagcctttttttttcttctcccatcccaagccaccatcccaacctgccttgactaaactcaatgaacaggaaccattgtatgaatcggaaggaaaatgtcttaaatatatgaagttataatgagttggtaagtgctgtaaaaatactctgtaacttagttggaagttgcatcatccatgcctgtggcactatggactggacccaaatggtataattcttcagtgtaacactgaagtaatttttgcatctgccaagtaaatggtttagatttcaaacctatgaaatgccgaactgtaattgttcaattctagtgaaccacagatgtgtttaatttccttcctttactttttgctgtcttctttaggtaagctgaaccaactaaagagtggccttatgtgaatctacaaagtgaactttaacgtcagtcagttaatatactttaacacctaaatgttgtataacactgctctatatagcacttttaaatgtataaaatttttgatagaggataagtccatttcatttagggaaaacagttgtttcaaccacatgtattataataggagtaaaagtggcatatcgtaatgaaagaacacgggaagtcagaaaacctggatttatttttgcctctcctgtcgattcttcatttgatccggcctgaataatttccttttcctttaatttctatatctgctgaaggtgaataataatactttcattggccacatagaggtgctgggagaatgaaagataaattctcccaaagcactttgaactgcctagaagaaagacttatttaaacaaaagttgattctgttttctatctttttatttcttacaagcagacaccaaagtaagtgttagaagagcctcaaagatttggttattttttttttgcaacttttattgtaggtgagaaggttaatataattgccttcattgtataaacagggaaactaatgctcccaaaaggtttgttttggggcttaaaatgagtagccctttatgagaataggggaaattgatgggggtgtagatgtaataacatcagccatgagttgacaattattaaagctggtaatgggtgtgtctgtttaggggggttatcatgaatactatcatgtctaccttgtctttgaaattttgtattaaaaagttaaaatttaaaaaattgattaaaaaaatagctcattttcatttgcaaggttcttttaaaaatgctattgaggctggtcacggtggctcacgcctgtaatcccagcactttgggaggctgcggtgggcggatcatgaggtcaggagttcgagacaagcctgaccaacatggtgaaaccctgtctctactaaaaatacaaaaattagccagccacgatggcgtgtgcctgtaatcccagctactcgggaggctgaggcagaagaatcacttgaacctgggaggtggaggttgcagtgagctgagatcgcaccactgtgctccagcctgggtgacagagcaaaactccatctcaaaaaaaaaaaaaaaagacaaagtatatgcttggaccctgaacacagacattttagtttttcatactcagtttttacattctatttccaatgctttctaaccatttactacttttaacatattatgccatttctttagcgttaatatattacacttttttcttactcccgttccagatgtttgtcatgtgctttgttgtcaattttagattttcattttcctatttttgggaattataagcagtcacttattaacccaattactttatgcttcaatgggcttgtcattgggtagccatgtgaattatttcaatttttagagacacagatcaacctgctaccctatacccacaacagaaaactgccgacttccccattgtaggaacttacaatcaaacggcatttgaaacatgtgagaacactcctattattaaaaaaaaaaatcaccctcaacctgggttattttcactgacagacttcatggttaaagcttgctatttcatgagctcccagatgacgcaaatgctgggaaatgtaacatactcactgtgatttgtttttagacatcaaaagaaatccattttacaaaggaatcatataactttagagctaagaaagatcttaataatcatctggtatagatctttccatttatttatgccagaacctaaaattagaaaggccaggtaatttgctcagtgttacataccttagtatggcagagctggaacttgaacctgagttccctagctttcaattcagagttcttaataggttgccactcaagtgcagtcaggtctttgatgctatttgtgaacaccaaatatgtctctgcttcttacaacttagaaatcttactctgttttgcaatgccctgccaagtcatattggagcctgaggcaaaatgaaagaccaatgacactgatcctgtctttatttaaaattctgatattttcttcactatggatttgtgggattaattttgattttttaaaatattgcattaaatattatatcttgactactgagttttttagtagctcctaaaattttgcatttgaagtgggtgccttgcttgattcaccctagtcccaatcctattatttttgctttaatctactaaatccctttttcagccttctggcaataaaataaaatcaacctatggaacctttataagcaaacccatactattggccacttacaaacaatggtggcaaacaaaccagaatctgcaagtgcttttcattggcttgattgttggtaacattgcatggtaattacatagtcatttttggctccatgaattgaaactctcttggaatgtctagcagtttattgaaaagagctcaaagccaagacgtgagttcttttgtttgatccttcacagtattgtgttttaggctcttatatcgttgtgtttgttttgatttctataaattgggactcaagggaaggaagctctttataggcctattattttcattttacttggtcctctcaacacctgtttgagataggcactttataggctaaaaccaactcacactgacttaagttaaaagagaattcactagctaacacaattgaaaaatctaaggagtagatctgacttcaggtattacacatcattttgtcagggctttctctctcgtgttttctactgggttggctttattattattcaggtttttcctgtgtagtagcaccaggtgtatactctactagcttagcaaccttagtagaaagggaatgaatctttcctgattgcttgagccagagtctcagaattgagtataattggcccagcataggtcacatgcacatccctgcactaggcattaaggcctggcgaatgcaattaaatcactggctgaacctggttcatgtgttcaaccctgggtcagggactggattgagagtagaagagatctgtttcctctaaaggaagagacgactttttaagtcttttccccccaaaagggattctggacagggaaagacaaatgtcaactaaaatgttactattctcacttcatttatgaggaagttgaggattaattaagtgaattttcacgaggctgcatagctaatgagtgataggatcttaactttgacccaaatctgcctaaatctaaagcccatctcttttctccacaccttgtatccctagaacatcatgcttcttcctccttctccttaatgtgaaaccatgatggttgccatcactttacagcagtattcttcaaaaaggagggattttgcccccagaggaaatttggtaatttctggagacatttttttattgtcacaactgtgcacagaggtgagtgtggtgctactgtatagaggctaggatgcctatacctcctgtagtgcacagaacaattcctcacaacaaagaattacccagcctaaaatgtcagtagtggtaaggttaagaaaccctgctttttaggttcaatttctcggctgttactattaacatcagttttgagagaaataagtaatagagagcaggattgaaataattcatacatgtaggtataattaagttgtctcttaattcagggaaacttcctttaatttccatagaagctaactttagaatattgaattatcttggttagtgagtaaattgcaatagaacgtaaattcctttttaaaatatttgttttatgcaagtttaagctaacttcccagacataatttttcattctaaaataagtcctataatttttttcttaaaatagaaatctagggatattttaaattgaatactgaatgcttttaaaggaaatatataagtttatctcaaaagccttttaatatttcatatagaagtttctataccaggggaaataattattttttaaaatccgagctgccgggcgtagtggctcacgccagtaatactagcactttgggaggcggaggcaggcgaatcatgaggtcaggagatcgagaccatcctagctaacacggtgaaaccccgtcttgactaaaaatacaaaaaattagccgggtgtggtggcgggcgcctgtagtcccagctactcgggaggctgaggcaggagaatggtgtgaacccaggaggcagaggttgcagtgagccaagattgtgccactgcactccagcctggatgacagagcgagaatccgtctcaaaaaacaaaacaaaacaaaacaaacaaacaaacaaaactgagccaaagcatttctaaaactttggatgataataagggatttaatgtactaaaaagcatacagaaattttcttcctgtaagcatgtgctttgtgaaagaataatgaaagcagaagaatgcgttaaatgtattatagctgcagttattgggtttgacacttcagagaaatcaaccttcttgttaaatgacatgaaaatagtttatactgtctgactccttgagacttgcaagtcgtttctgaattgtgcatatctgaatgaatccagggaaagctgtgcttctgtagtcaaaccacagataatattctagtagaagagctgaatgagtagagtgatactacagatggatttcatataagaaatcttttacaatccagcaagtcaaatttattgttggagtcggaagatttgaggcttagcattttctcgttttgccagttttatacaaataattcttcttgttttccaaattctcatgactgtatgcagcatggaattacaagtccattcctttctctggttctttttaaccttatcagacccaacccagatcaatgaacattcctctgatttcaactgaataattctgacttgctttgatatctcacatggatgactttcttcccatctctcctatcccccgatggtccttcagctcatgcctgtcgtgcccatttttttggcctcacttctttacctaatctcaggaatactcattgctttttctatttcttctatttttctttggcctctctttccgctcccatattaaatttcctccttggctataacgcctgccttcttctgtttcccaagtcctatttactggctctgtatccttagactcacttgtttcttaattcatatcctcatctactaaggtgcctaatggccacccacctagcatattttagtaaggcatgtgtgtacagacaggtcacctattcattgttaatagaattcaatttgcagtttccctggaaataaggcagtttctgatcttcaaatcacccaagttcttactcgttagaatgcaagttcctttgtcacattaggaaggacagtaatatttatttatgaaaaagttgaaaaaatactgtaataaatggtgctgggttaattaatatattattaatatggtcctatttttcttgagaagaaatgttcttgaagatttgaaatttcttatctgtttacaaacattttcctggtgccatcagcagtttattcctctttactgctttgtgatagggcttggtattcccaattttacagagcagagatgacaggtcacttgactaaacaagtgacttatttagaatttcacaggaaagtaattacagagcccttaaatttcctgtctcttacttctatgatataaaacaatttactttgcattccttatttatataaatgccttagagcatttcctttcctttaataaaatcatgaagactatcacctggtaatgaaattgttaggatggaagagaaatgaactaggcacagtgtacgtgaatttgattattgccttttcaactgtctaataatgggagctgtgggctcataggctctccttttgaattgtgaaaactatacttattttatactacattggtgaagttccctgaagtccttaaaaaacaaacaagatttaaagtgcaaaatgttattgttaagttaaaatgacccttgtgtgtttgcaaagctccgcgggctttctggggctagtgatccccttggtgagcattgtggagtgtggtgggaaccagccatgttttggtgatttcttttagatttctaaaactgtttttctgttgggttgaagtgggaaaacagctttggaactgcttttggtgttgctctgagtgtgtttgggagtgcattccaatagtttgtgaggggatgttagctgttcaggaaaaataacccttaccaaaggtaatggttcccactagcattttcagtaacatgtaccagatgtgggtagttaattattctcagatctgataaatacctgccagccaagcctaattttattttcagtaaacagtggccaaaggtcctagctgttcatttgataggatgggcctgtttgcacttatctattaataaaagcacaacactcctttagttttcctttcccagggccagataaaacattttagacactcacgtatttgtcttagtaaatcagacaaagtaaacaaatctggtagattaacttggtaaatagagtgtggttaagtgttacctttggagttgaactcagtgccatataaatagcattaatcgcatggtattttcaataatctttatggagtaaaacggagggttgtttttttctttcaaccaacagggacttaagtatatttcttaagtactttcagatgttcttctgtatggagattttaaaatcactttaaaatgaaatttattcttttgtcccattagtaacttgttgggaactttgtactagttaacattatgtttaaaaacctggaaacctctatagttcatctcagaagaaaaataggactacatagtggcatgcaagctttgccagacagagataatggccatctagaggttactgatttgggtggaacagtgaaaatggggccgcttttatggggaagacagtggctggtaggcagaaattcactttattcatatgcattttttttcctcttgggtaaagagttttattagggtcagaagtactatttatttttgtgaggtaaattcttgtcttgtgagaactggcatgaaacagactcattatttcacactagccaacaaaacagtattttatcaaagtaacttctagtcagtccaagactggactggatttgtactggtaacctggtggtgcagggctctaagtctcatgccagctcttgtctccctcattaaacttccttttttagtaatgattaaaaacaactctctttactacaatatattttctcattggctttatactcgaagttgcaagtactttataaaattatttttagttttgcatgctgtataataatccatctaatttggtaagcatagtacataaaagaaatagctgaaaggctttagagaaagttccctactcatacctccccctttacaatgatctcggcattaatatcttatgctgtaagagggtggcctggcacagtaccatgaatattgtgcccgatacccagtggtaacctaccaatgattgttatgaaaatgatggtgatgatagtataggggagagagtgtaaaccaaaagttgagatctgtattctgttttcagcttcattttaatggcctactggaagaccaggtacattatttctgctcttttttttttttttttttagtttctccagctatacatgaagaaaaaagtcctagtccactagccaacctgacaggcatgttgtgaaaactaatgaaagtataaagttctcatagtccgaagcataaaaggtgctgtaaccaataggtacaaaatactaattattatttttacagttcagcatagtaaatctttggagtaaatttttttcattatatttactagtctttcctttaagaattatttgccaaatttaactctttttctcttttaattagacccagagtatagtaaaaaaattgatggtttggctttcagaaagagttattttgttatctgtaccaaattttcaattaaatatttttagctgtgaatcaagtttcatcttcaaaagtgtcttcaattttaaataatttgagaatacttacctggttagtaggctaaactaacgtagtagggaagagagtgtaagaaaagtgctgttgaattcatcattcccattagcaccagtctgcggattcccaaacatgtatttctaggctcagatatttttcctgatccccagacttattaatccaggaactagtcaacttctttacctggatgccctgtaatgatttgtagcacaacatacataaaacttaatattctgttcctgaatttgctctctctgtgaatggaatatctatccaccccatctctcaagctgaaaaaccctcaccccatttcctcaacatctgtagatttaactgtcttaatactttatgccccttatctccatcccacaattactaccttaattcggcttttgctcttctgtcaccgggcagctgcaattgtcttcctgccaccagtctggtctcattacagtctactctcgataccatttccagattaacctttacaaaatgcaaatcatagaatattactgtctcattttaaaaatatttagtggtttcttgtgtgctataagacaaagtttacactctttatattggttattgaaatcttaataatctttaccttgtttctagtcttgaatcctcttatgacctctgttctagtcacactgaaagtttgtgggttccaaaacatgccatgttgttggacattctacattctctccacccacttctttaattgccaacactgttttatattttaaaacctaattccagtgtgaagtcttttgtaactccctccttgtatcccatcataccctgtatatacttcttacatagttcctataaaacctatagcacgtattttgtgtatatccttcccttcctgctttattgtatgagagattatgtcttgtttatttttgcctttcaacgtccagctcagtggttggtacagaggtagcacttggtagattgattagatagtgggtggagtaaaattctatgaccatattttcctcctcaagttctactcccttttcagtgttgcatggaaatggctttttaaagtactcagattaagatttgatgggtagacgaggtctttacttaattggtatgattgatgggacaacaggaatactcctgtaaccactatacctacccaaagatttcatagacagtctgacatttccccatgaaaagtcatttattagagttctgatattctacttattatactccctgccctctttagcactttataggtacaaagtcctcccataaacattatcttatttaatttttaaaacaagcttatgagatggattttattgtatatactttaactttatctctaaagcatatacaatataatttgcacccttaggcagatctgtgaattgctttgaagaataactcgctattctttttcgtgatttggactactctgatagtgacactgttttgctaagctgtgagagtttggaagtgtctcccataattttgacactagattttattgggtacagcacaaatatcactccttggggtgggccacatagtcacggacccacagatactcagataggaagaggctctaaaggacattttctctttatatatggaattgtatgaaatttaatagaaatggatctctagaattttactccttttaatcaggacagtagtacaaagcaaaacttttgtacactgcctagcatggtgctcagttctgcaaacgtcttttatgtctttgatagtgatggtggtgatgatttagaagcagtttttgcccatatacatataccatggtaaagcagttttctcgtttaccaacgatctatgaggagcattatttttatagatcttagatataaattctctccttcagactgtttgcctgaaccttaaaatgtagcatgattacacaagcactctggaatttagattaaacagcattcaatttgaaaatctaatcatatcatctaaatatcattaagtaataataggctgattgatagggaccaaagctgttttggcctggtgttgcatgcctttcactcagccagccttttcaaaccaagatgttgataaagaggtctataaatcttaatagttggagacagtttaaaagcatagttcactggataaggtcacacccacttaagtgacctattttgtatacttttcaaaaataggttaattaacttaatagaaataagactctcatattgatgtgcaattactactaaaacagctttgtttttttttctttccaagtgaacatgatgttcatgaaattgagggcataatagccatgacaagaaccaggcttagcaaggcaggtcatgttcagcgagtacatttcagacttcccctttaaaatcctcttttattccaggtcctaggacataagcatacacctccatcagagcagtttattcctggctctctcctatttcagtttttaggagggattattctagctgttgttgttttcctaatcactataacagcactttatatagtttctgatccctgaagactccagcttgcatagtaagctcaatgaattttggtctctttttcttttaatctgaggctttcttcatttttctaacagatggatgattcatttgctaccctgggagaagcatggtttcagaggaggatacagtataaaagggcaagggagtacccagaccagagtcatattctggttatattctcctcatacagcctgctttcatttgttgttgtcgtttagtgcccatttcaaattttctgctcctaaagccttttatctactcttagtcttcttattgatgattataaccttcttagtctattattggtcactaattttgcataatttgattttcccattcatctgttccttaacatataaccccttaatgttttatatcgtaagttgagtacatgggcatttattattctttgaacttttaaatatattttaaataacatatacatttagaaaagttaacctcctcccccagtctgatatcttgtatcacacataactctctgtgtagatgttgctgagtcctgctggctcgaattttcctgtggccagatggtctgagaggcagttagtgatgcacattcatggaagggtgggttcttgcaaggtagccatgatgggtatatttgaattgatggatatatgttgatctgatgggcgtattttgaattagaggttctaatatatatagcagaggttctagatgacctctttgttcaccttacagtagtgtcatttctctgcttgtttgcactgcacttacagcaaagacttttctaaattaaacaagtcttgtttatatgttttgtgtatgtgatcacaaaaaatagcaaagaatactgttctatggactcttagctgtggtggaaagaaccattgaaactctctcagcctttagttcttcattaggaagatgcctttcttactgagggttgtaatgattgtgaagtccagttttctgacttctccattagggaataagagaactctttggttttaaattgaaagatggagtgattcactctccagtgtaggagggaacctactctacttgaatttgctatatttctttatttcctaggaaaatgttggtggttttccctcccaagcattctctctagagtttagcagcatcctttccttgaaagcaaaggcctcatttcctatttctttcatatcctttaatttgcctagtacagggtccatttcatagtaagcactcattaaaaacattttagttaattaactacaaaatgtctggctcaggtttaggagagaatgaaagattgggcaggggaagtactggcacacaggagaattaaaatcagaggatatcctttttattactaattctttttccaataataaaagtactctattttccttatttaagaaagctatcatttaaaaaattagtgttctaaaaccacaccctgaaatgactactgttaacattttgtcatatttcttactagtcttattttatacacatttaaaatttttacatagtttagcttatattttatggtttttatatagtattttttacttattttatcatctcatcctattaaaaacttttttgtcaaaggaattttaatggcagcagaattgtttatttcacaactgtaatatgaattctataaccattctagatgttggacatttaggctgaatctattttttcatgattataattagcaagttgccttttggaaaggctatacaactttttattctcatttctgaacataaaatgttgatgaaaaaaatgtattgggaatgataacttcactgagttttagaccagggtttccagaagtaaaatgttcctgtcttggttttggcctttgggtagaaaaaagtaagtttttaccaggagtccctgaaagggaaggccctgctggccaggggtttcaggctcctcctccataacccatcaagtggccaaagtcttgattttctgtgtaaacgggtagacaggttctcagcctgatcgagtcatgtatttatagaagaggttctctttttcttgaagaatttctgacttacttgatctgtcatcattgtctcatatttgtaactttagagcctgacagaacaaaaaagaaataagccatttctgtagcagaatcttatttggagaaaaggattcaagactacagcgtcctatttttttttgtttgtttgtttttgttttgagatggagtttcactcctgttgcccagtctggagtgcaatggcagcaatctcagctcactgcaacctctgcctcccgggttcaagtgattctcctgcctcagcctcccaagtagctgggattacaggcgcccaccaccacacccagctaattttttgtatttttagtagagacagtgtttcaccatgttggcccggctcgtctcaaactcctgacctcaggtgatccacccacctcggcctcccaaagtgctgggattacaggcataagaaccgcacccagcctacagtgtcttttactaggaattgtaattttattagtttctaaagaaaatattaaatgcagtgttttgtaggcagtgattacctttcatcttgtttgtcatatttctcattctttttttgtgtgtgtgacggagtctcgctctgtcgcccaggctggagtgcaatggggcgatctcggttcactttaacctctgcctccggggttcaagagattctcctgcctcagcctcccaagtaactgggattgcagatgcccaccaccaagccctgctaatttttgtatttttagtagatacaaggtttcaccatgttggccagcctggtttcgaactcctgacctcaagtgatccacccacctcagcctcccaaagtgctgggattacaggtgtgagccaccacacccagccatatttctcattcttattttaggctgatgaaaatactaaatatttcaacacctctgtatcatagccatgtttaaatgtgcatatccaccagtcaattttaatacattcctttctagtaaattctgttaggtcttcagttcaactgtacctccctcagtgtcactttttaccttccctcctcccttaaatcgcctagttctcattttgaaaaggtagagaaatcctttgtcagtagttaggaggttgtagatcctgtatgattttctgtcattacattcttaatctattacatgtgtatttgtcccgtccttactgacttaacctctgaccacattgcaaaatgtaaacagagccagataccgacaggtttgtcccttcattagccagggcccaattcataatttctattttctaatttggagaataagaaggttagctagattaagaggctttcctaagtcacataaccgtttgcaagtagctaagaacaggattgtgaactcttgccaaactcctccataaaattccataagcttgtgggagctcatttatacaatatttaagaggttatataggcaaggagaataattgaatttctatatatttagattgactgatatttcccaaacttcaagtggaaaaaaaaagcccttaaagaaagagcttaagagaattaaaatgatgtgacccgaaccatggttcctttctcattcaattattttcttttaaccactgatggctttttgtgcttggctgggtaactttctagctagtcaagcctatgttatgaaagagaaataagacacttaatcctgtgaatgattaactagtattggcctcccttcccagtagtttgcccttcctgtattgtagtctgtgtactcatttctgagccaaatctccaaggtctcttattattgagtgtagggacacctggattacagggagttaggcctttgttttagtctgaagatgatgtggctaattatacagctccaggcatttgcattttttcaaggcattttaaagtttattgcttgtgaaaacctagtttgtaaagtatcatttttaaattttacaggtgaagaagtagaactcagagaagttttacttgccaaaagttctgcagcaagtcagtggcaaattcaaataagtgtacactcatgtatacttagctcagtgtttaactcatggaggtattgttttgtttcttatttataatataaagccaagtagggctggctagagccatttgtagttaatacattttggtctttgatctttttccacataaggtcagacttcaagatagaaaaatattctttatattctttgcaaagagctgattgccatctttctatactgcctgtgggaacactctggccttagaatccaagattttattatccaagacagcagccagtaagtacagtgagacctaagtggggaattaacttttgggctgtagattttgaatgagaagtcctactcaggatctgagaggtgacaagaacgagtgactattcattgatttggattcctgggtcttggcaccttctgtgggataagaatcacatgcaatatgagtaattttgtggaaaggtcttggtcctggttcatagactgtctcagttcctcagtagagagaacttagaggagaaatgactcccttgttgtcatattgaagcagcagcagactattagggagtacccatgttcctggcttctttccttgggctggaaccattcaactgcacagataaatgtttactcaaggaagaatgcatagctttgaaacagtcttaagatgagtaaaagtcttaagatcagtaaaatatacaaactactcctatgtaggtcattatattaacatctgtggccacatattggtccatgaaagggatacttctagccactgaaatcttaaccactagaaacttactctgcagggcatctttgtaattatggcactgagtagcccaagtcttagattatttcattgtgatgtttccagtgtaccatcaactgtataggtgattagcatttgcctattaattccttcttcctctcttatcttcttaatgactcttatacattttgttatcttttcttactctccatgtagtagttcttactctgcatgttcagactctagtggaggtgctaggaagttccactttctggtagattatttagagtacaggatagtcaagggaataaggatggtgctaaggcaggctgtggtggtttaagcctatagtgccagctactcaggtgggaggatccctggagcccaggagttccagggtgtagtggagctatgattgtatcactgcactctagcttgggcaaaaaaagtgagaccctgtctccaaaaaaaaaagaaaaaaaaagtggttataagaaccataggaaagagaacaacatcattttgactaagacaaaggcataaccttgacagatctcagtgtctccaggctaagagaagagcaacttagatatagtaccttgagcctttcaatgattgctgtttaaaaagtatatgactgtaggataggatacattggaaatactgaacaatgctggaggaaagccaacagcatgtggataagaccatccaatggggccaagatgagggggcactggattggatcaacgttaatgactaaaattctctgcttctaatatacacatgactaactcccttactcacttcaagcctttgctgaaatgttatcttctcaacgggtctgcaaacctattctgacctacctatttaaacttggaattaattgaatgaattaatggaagcctcatgttgattaatcctcttttcaaggactgaactgcattacataagaaaatttaattctattaatggtgagctcagtggcacaatccacatctaagtttttagctttatcctccttgcaaataatgatattaagttagtgtaaatattaataatatttgcccatgagaaaggaacagaatgttctctacctttctccagccatactttgaatcctggggaatcagcatttcccagaaagatcaaactatcaatgacataaagcaacagattgattccattgatgatctttttataatactgacgtaccacattcttccccatggcttttgcatttctatctttccatctgagacttacaacttcaaactccattttccatgcttttgctggcatgaagaaggaaaaaagaaatcatggtgcatttactggccttaaagaaagttggtatgtttataaaagaaataaagcatactgaagaggaacagtatttgagtttcatcagttaagcagagcaatttaagtactgaatgcttcatactgaccatttccattttattcattgtaggcaggtttataaagatggctaggtgcacttgtccatggttctcccacccgtgtttgggatgtgctacctcacaagcatagctggctggggatagtctttaggtggaaaatagctacgaaatacctatttttggttgtattaaatgagctatggctgacatattctgtgattcatttctttctaaatgagtgctggggcatgatactaagtgtgcccatgtctcactggtcttgggttcttttatggttccccagccaaattcaagttgaattatggtgtccgtttaacttacaggtgtctgagataagttgtcagttaacatttatacatgagatcaccatctcctagtaagtacagagtactggtagaaaatgtgtggctcagtctgacttgggttcaaatcactctaccgccttttattacatgaattccatcaagtgaacctctctcagcctccatttcctcatcagtaaagtctgacagttccaagccaatggcttaatgatttctctactatatatgcacttcctagaatagttgcattcaaatttgcaatatctttcatcaagatgttgcctctctttccttctttttctcttccatcacagtaagtgatagaaacctgcttgctgcactcataaataaatggccagacatgtgctataataggcaggatcctcctgctgagcctggactccatttggatgctgtgttcgttagttggagtctcagagtatgtgccaactcaccaatctagctaatccttaaatatccctaggagatgatgaggaggcagattttatctcttaggcatgcatcttggaaaacataccaagtaacacgtatctatttttctggggctttgtatggatgggtggcaagtgaggcacagagaggttaagaaacttatccaagattcacaatagtaaatagtagaactgggattcaaacccaggtccaactaattccaaaacctgtactcttaatcagtatgctgttctcaaagacttagctcttaaatccttagtcatttctcaaaataagataatacattctagtgctgaaatagtggatcagaaaatttagagtttactctcagctttaccagcgacttcacctcaggcaactcaatcatcattagatgatttctctatgaggaaatgaggatcatgatgtctgtcactcagggatagaatgagcattaaaaactaaaacaatagcctctgtaaaagccctttggtctccagagttgatgaacattgcattaatctacagcattaatattttatattgaagacttctgagcaggtcattttgaacacaaaaaagggtaaactttggatcatgtattccctggttctagaaattaaaggtaaccaaccttgaaataaatagttatagcagtgccaaaagaggatacgattatggaacaatatcacccaggtatcttacacagaaggcttctggattgtttcagttagcagcaagagtatgtatttcatgggcctggggcatattaatcaactgcactatgccaagatggagttctgttttttactagagatctgctctaaatcactctgttcataatattgtcatcaaatttgccatccacaattgaggcatgtcacaaaatgagcaaaggagtccttttctctagagtgtaactgccagaatgggccaagaaaggtaatgttggactaagacttgtttctgagaaaagtttttcttccagattcaagactgacactgagtgtacaatgccacattgacttccaatggcaaacagcacataattctgtacacaaacacttagtgatgttttcctctaaaacttttaaaagcaccatctttttctgggtgccagaaaggcactcagcccaacagtataagcctatgactgctcaagcacatgtgtgtgcatgcacttgggtgtgcatgcatgtgtgtatgtttacacaggtaggcacctaggtgttttgttctccatttttagaatgatctttgttgctggccagtaccagagtgatctaattatacatgctttactgatttccatctaccaaaattcatgtttcaagtttaactagatatccttagtggatgtttccttaaaaacatgcgatcacatgtgcttatcttttctctcactaggctggagcttaagtccacttatgaggagaaaatatataaaagcaactctaaattggtgagggcgatggagggggccagtggggaatgagagaaagggaaaaatgaaaataagaagcaattaagttttttttttttaaattagcctaagctcctggaaacagatataaataaatttgagaaagccttccaaaagtcagaagaatttaactctccagccgagatgttcaagctttctggcatttgactaacgttttatgctctcttgtctattgatcattgagccactgttgagatgaccagatgaccaggtgctaagcatactttaaagaaagttaccttgcctgaagacattttcctactcagatatctttaacagctcaatgcacatgaccttggcattgcttcaaaggtggcagctcatccaagtaggcagaatacctggtctctcagcactgcttttataatgccctttttctaacgttgagctggtgaccatgctgccctcttcattttgcagtaatcagggttgtcttcttttttcatatccctttcctgcctgaggctgcttcaacaaacagcaagtataaactgaaaccctatctctttgcggatcaaacacacagcttgaatacattgataagtaactttaaaaaaaaattgtttagcctgtggacctatttatcagaatgctatataaaattattgttttccagtgacccaattagttgaaatattctttctgaagctataggaaaaagacttaatattgtttgatatgattttatcatttgtttagttatgtatcacttcccactttacagtgtgttatgcatactttctttttttctgtcatccttcccccatgtctctactcttcagtctcatgcataaagaaacagggttccctacttgacagtaaccacatgaggagttgacattggcaactggtttaagacttcgatcataagtcatctaagtaattgggctatgcgtatcctgttgaatcacattccttctcaaatccttctttgttaaaagtttgaagcccaggcctttcaattttctcttatccctttaagtccacaaaggaatttttaggctgtttctggagggttataacttctccccagtgctgtccaatagctggcatattggaaattggcagaatgtgggtgcaagagagaagggagttctcagtaaagcaccattagaattctcccacagtttgacacattcatttcattgcccctgttttgtgtggctagcaactgatgttgtttggctgtgacatgcgtaaacagatgttgtaaaaaacctgaaaaacaaaaaatcatctttccctactttttcaggcatactgaagacagaatccttttttggttatcttgaagagtctgaaataggaaacactttgaagtgtagataaaatttctgctctggtcacaatggatgccaagtgttataaaatgattgtgggagtgtgtttctatattggcattttgatatagaggcaggtaagagcaatgccaccttcctgcagagtactctaaaaccctttcttccttcattaatagttttcctttgaagataaaggaactgctttcattatgtgtgaagcattccttttacagttaaattactgtttattggtgagtggtttccttgctgcgctagtatgcggcagatgtttctcatgtatccctaggttttcaggctttttcttttcaggatgaggctctgttgtcttttctttttttctttcttggcaagaatctgattgggataaaacacattttatgcagcaaattaaaaatacgtatttaaatttaccttttattttttacctaaaaagttcgcaaactacttgtagctattattactctgaggtcattcctctgatacaaatgtatttgttgttttatttcggagctacagatagaaaatctaaatacagaatattaaaagtatgtagtgtaacatgacttgtacttagtaggtactccgtaaatgtttggaacttatgaattgaaggtttctttctgatcttagtctagaacagtgcttcacagcctttcttatgtcataatacacatagaaattgataatatttatatgtcatatggaatttttttcaaagaacatctctagtaataacataatacagagagggatacaagttgaaaaatgctcttctatgttgttattgtaacttttaggagtaagactaccatagaaagcatgcattagaatgctaggctatgacatgggtaaacagatgttacatctttcagggcatcacaccataggagtggtatgccttacatcacatgggagatgtgaatggcttataaggagtcccaaacactaggacaccagccagttgaggtctgacttcaagacagttgggtcttgcacagatggtagaaacagatggtagaatgtatatttgtgtatggggggagagggtgccctgtattccaccctttattccccccttgcattctgagactagagcttggcctatggcaccgacaattcctcagtcctgaataacatgtataggctacagcattgcctagttccataagtcaccctaatggttaaagttttgccacctgtcaccttaaaataccccaactttgaatggattctgaaccatagcctacgtgtttagaatgtctagtttgatggagcacagatggtttggggagcgctaacattcatctttactttgccttcatctattattttgcccaaacgtgtttatcctacagcctgcttactaatggctcagtttgttctagctagttgtggtttgggagtaggaggccactctgcccactgttagatgaggggattgtaaatgttagagagggccggggtagaggagtactctttttaagaaaagtagttgactttgataatgaaaaagtatcatcatgattatcgtcatgctgttgagtgctttactacatttcaggcacgataaggttatatatttaatacttacaactttatgagcagctgtcgtcattatcgccactttacaaatatggaaacccaggcaaaaagaggctaagtaactttgccaaggtctcacaggtagcaaattgcagagccagaatgcaaaactactgccttatgatctgcttctctaagtagctgggaatggagaaagacggcgagcagatgtatagaatgcactgattagggtgactgggtgagctctgtgctgagttatacttcaagatgtacaggacagagttagggaaatgtgagaccaagggcttttctgggcaggaacaaccatactggctgctgtggcaaggttagagcctgccaggtaactacagtgagacttccttttcatacagattgggggaactggcaagacaagttatcatcacctccacatagcaggtgagggaagggaagcaacagcagaggcattggtgttttgtatttagaagggcacatagcctaatgctaaaactcacccattagttacatcaatgtttggatgctctttgaaagacttctcaggagaggtgtgagaatgatttgatttgaaggtgggttttagtcttgaccgtgtgccacagcaaacaaaatgaaactccccttgagataaaggtaatcaagatgaaggtgtatttacaaagatgagcagtgggatttatccagtgactctggaaggtaatccccagatttagtgctccatgaataccttgccatgttcctaagctggtaaattactctgagttttatgagagcggattgtgggaagcatctagatgaaattcagcctgtttcacctcgagtccagggctcactaatgcaccccaggtgtgcagactgcccaggctttctgccttggaagcctcaaggaactttcatcccaaagggaagctttgaagaataccaaggacctttctatctgtccttgattttttgtcatttttctgcccacatttggtaattggagatatttgtggtgttaaagccggacttgttccttctcagcctgccccctccagtagtgaaattttaagcctgtggctttgattatgcaaagcagtgatttctctgcagtgtccctcagatgtaaaaggagaatgactgaaatactagaaaggaagttacgggaaatcaccaaacaaccattttccatgtctacagatcctttcatctgagggcaaaagaagctggagagggtgcctccaaaggtgggggtttggaggagcacaatttaaaattctctgggttgtaggctaaggatcaaagggttatgtcctcagaattacacggtgagtcactggaaaaactctgagtaaaagtcaggcatcctgttttccaatcttatatgcctaataatttcaactggctttaagacagtacatttatgtatatttttcatttagatccattgccacctaaagaatataatgatgtatgcattatatagattatggtttccatgccctagagcatcatgaggtgttttgccatgagaatacagtgggttaggtgaagaggtgcttgagaagccttggtgtctaatgtgtggtctcagtactctgtggaatctcctcctcccttacaaaccactgcctctattcaagccatcttgtgcttcaatttagaagttctcctttaagagagagttttccaaagctaaattaacagctatgcagtgtactgagtaactctgtgatttactttttccaattttgactgctgtaagcatttcagtttgtttcccactagtttggatcaacatgttggttttaactttatctccaaatgtaatgattttacatattatagacaaatgtgtttgcacagttaagggcagcaggatttgcttgaacagagaatatgtgagttctgtaacttttaatattcaattcaatttaaattctttttcatatgtcctttttatatattccagtttctgattatgggtaacctgacttgaaggtcagaccatctgaagtgaagatggttaaattgtatgtgtttgcacatgcatacacgtgtgtgtgtgtgtgcatgcatccacatacacatgggtgttcatgtggtaaaggagagccagagagatgtttaatttcctcaccacattgtagaaactgaaagagacatgtactgcagaaacaaattctgagatacgtttgctaaccacttttttaggtttcaccttccggggaaaatgttaaggcatttgcaaacatgcctagtttcttagcgatttaaggcgcatagactctctgtgactacacctagagaggtaagacatggaaaagaacataagctttgagccacctagattaggggcttaatctggccacaccactttttagatgtataacttcaggttgattactggacctgtattccttttctttccttggttgacacttgttccaacttatgatgttggtttatgattttgattttagtttggttaacttcttatttgggggattttgactgacttaatttgttctcatcttgtgttagggttctctagaggggtagaactaacaggatagatgaatatatgaagggaaatttattaagtagtattgactcacacgatcacaaggtgaggtcccacaataggctctctgcaagctgaggagcaaggaagccagtccaagtcccaagacctcaaaagtagggaaaccaacagtgcagctttcagtctgtgtccaaaggcccaagagcccctggcaaatcactggtgtaagtcaagagtctaaaagctaaggaatttggagtctgatgttcaagcgcaggaagcatccagcacaggagaaagatgaagactcagcaagtcaagtccaacttctgcctgcttctttctagccacactggcagctgattagatggtgcccaccaagattgagggtgggtctgcttctccaagtccactgactcaaatgtttaactttttggcaacaccctcacagacacacccaggaataatactttgcatccttcagtccaatcaggttgacactcagtattataaccgtcacacatctgttatcctattgatcctgattcttgacctctagccgcagttccattcagagaagattagaattgtttcagagttgggctaggcacgatggttcacacctgtaatcccagcacgttgaaagcccaaggtgggaggattgcttgagctcaggagtttgagaccagcctgcgcaatatagtgagaccccatcgctacaaaaaattttttaaattacctgggtaaggccgggcgtagtggctcacgcctgtaatcccagcactttgggaggccgaggcaagctgatcacgaggtcaggagattgagaccatcctggctaacatggtgaaaccccgtctctattaaaatacaaaaaattaggcgggcgtggtggcgggcacctgtagtcccagctactcggggggggtgaggcaggagaatggcatgaacctgggagacagagcttgcagtgagcggagatcacgccactgcactccagcctgggcgacagagggagactccatctcaaaaaaaaaaaaaaaaaaaattacccgggtatggtggcatgcacctgtacttggatgtcccagtggcatgctcccagctacttgggaggctgatgtgggaggatcacttgaacccaagagtgcaaggttatagtgagattttttaaaaaaagttattttttgagacaggatctcactgtctcatccaggctggagtgcagtggtgcaatcacagctcactacaacctctgcctcctgggctcaagcaatccttccatctcagcctcctgagtagctgggactacaggtgcataccaccatgcctggctaatattttgtattcttttttcttttgtagagacagggtttcgccatgttacccaggctggtcttaaactcctaaactcaaacaatccacctgcctcatcttcccaaagtgctgggattacaggcgtgagccactgtgccttactgcttagagtgagtttgctactgcaccactccagccagccagggtgatagagcaaggccctgtctaaaaaaaaaaaaaaaccaaaaaaaaaaacaggaagaagaagaaggagaacaattgtttcagagttaaaaagaatcttaaaaatcattgtgcttgacaacaatttttatgctgcaggtgcttctctccaaagaccattggtaagtttacctgtaaatggaaacaaaatatgaacaatccccaaatctgtgtttctgaagatttattctttctaatgcttgagcattttgaaagagagacagattaataagaaggaagaggcttcctagtatgagggaaagtgttcatgagttttagtcctagctttgactctcattacacatgtgaaaattttctcatctttaaacaggcttaaatacaaagaataactgaaaaatattggaaacctaagtggttataatgttgtatctagcagtgggactaggagtgattctttgtttggtttggttctgtttttatttccaaattttatgcactgggagtgtactccttttgtatttactacttcacccccaccagccaaaatgtcttaaaatgtaaaatcatgaaaaataaaaggatagggatgattttcagccccactacctcatagggtttctatgaaaatcagatgaaacaatgtaagactgcgcattgaaaaataaataataactacataataaagtattgccaacatgttagatttagccttaaagaaattcagtttctgtatagggcaagtggagtggcatgcaaattcttgaatctcttgaattcatcatttcagtttgctattcctgcaagaggaaggaattccatagatccaaaatgcatatctatttgtcgcaaagacaataactaaagattatttgctgctactacagactgatagcaaatttatcagcattaaaataattattttaaaggctacaggaaaaacatgatcatggcaaggaattatatcatgttcttgagtagattagggagaaagaatagaattcaggcagacgaggcttgcctatggtccccaacctttttttgacaccagggaccagttttgtggaagacaatttttccgtggatgggggcgggggtggtggtttcaggatgaaactgttccacttcagatcatcaggcattaaattctcataaagagcacacaacctagatccctcaaatgtgcagttcacaataggattcgtgttcctaagagaatctaactctgccactgatctgacaggaggtgaagttcacctcctgttgtgtggcccagttcctaacaggccacagaccagtgttggtccatggcctgggggtacccctgcacaaatctaaaaactctccctttgaggcatcacattacccaactggaaactatagtataaggctgcagtaagcaaaacagcatggtactggtacagaagcaaacacattaaccagtggaacagaatagagaaccctgaaataaagccacacacctacagatgtctaatcttcaacaaagctgacaaaaataagcaatggggaaaggactcactggtcaataaatactgctggggttgttggctagccatatgcagaagaatgaaaccagacccctacctttcaccatatgcaaaaattgactcaagatggattaaagatttaaatgtaagaccttgaaatataagaatcctagaagaaaacctaggaaataccattttgtacatgggctttggtaaagaatttatgactaagtcctcaaagcaattggaacaaaaacaaaaattgacagatgggacctaattaaactaaaaagcttctgcacagcaaaagaaactatcaacagagtaaacagacaacctacagatagggagaaaatattcacaaactatgcatctgacaaaggtgtaatatccaaattctgttaggaacttattgaacagttgaacagcaaaacccaaataacactattaaaagatgggcaaaagacatgagaagacacttctcaaaagaagacatacaagcaaccaacaaacatatgaaaaaatacttattatcactaatcatcagagaaatgcaaatcaaaaccacaatgagataccatcttacaccagtcagaatggctgctattaaaaagccaaaaaacaacatgttggcaagactgcagagaaaaggaatgcatgtacactgttggtgggaatgtaaattatttcagccactgtggaaagcagtttggagatttctcaaagaacctaaaacagaattatcatttgacccagcaattccattactgggtatatatccaatagaaaacaaatttttctacgaaaaagacacatacatatactcacatgttcatcgcagcactattcacgatagcaaagacatggaatcagcctaggtgcccatctgataaagaaaatatggtacatatagaccatggaatactatgcagccataaaaagaatgaagtcatgtcctttgcagcaacatggatgcagctggaggccattatcctaagtgaattaaggcaggaacacgaaaccaaataccgcacattctcacttataagtggaagctaaacattaagtactcaagaacataaagatggcaacagtcaacactgggaactactagagaagggagggaggaattggggagaagggttgaaaaactaactgttgagtgctgttctcagtacctaaataaggggatcattcataccgcaaacctcagcatcacactatatatccaggtaacaaacttgcacatgtatcccctgaatctaaaataaaagttgaaaaagaaaaaaaaaagaactatccctttgggatgttatgctgaccacatagaaatgtgggaaacctgcttgttagtggtgacacccacatggaagtgcttattttacttatccaacttcccacaacctttgtgattatgggccaccatcaagagatctcatttaaattacatttatccttcatatgcttttatgtttgtaaaagtaatacatacccttaaaattcagacctttcagagatacactatggaggaagggaaaaagttccccataatcttagacttaactgatattagcatgtttgtatacagtccttcaaattttttcaatgcgtatattaacatatttagtattcatttgcttcacaaagaatgtgtttatatattatatactgttttgcatctttttctcttaatacattttggacatatttttattttatttgtttatttttctttgttttttgaggtgaagtcttgctctgtcacccaggctggagtgcagtggcgcaatctcggctcactgcaacctccacctcctgggtcaaagctattctcctgcctcagcctcctgagtagttggtattacaggtgcacgccacgatggccagctaatttttgtatttttagtagagatggggtttcaccatgttaaccaagctggtcttgaactcctgacctcaagtcatccacccgcctcagcctcccaaagtgctgggattacaggcctgagccaccactcccggcctggacatattttataaaaccctttgtaataccagttgtcttaatttttcatattctttcagagtcatttagtccgtgatttcagtggtacatgtcttacaaagttaaaaaggagagctggatagtgatttctttttttttttctttgttgttcttcttttttctttttccttcttcccttcttcctttttttcttcctcctcctccctccattacctcctcccttctgtccctcctcccccctcctcctttctccccttctctccttgtttttccctcctcccccttccctttctcccatctttcttctttctcctcttctttcttcttcttttaggtaagaaagagttttttggaatgatctttcagaagcagttgctataggcaacaatattaggtttgtctatggctctacttttgtattagccaatccattacttgtgattgttgtgttgataatgggaatcgtgaattgattacttcatcaaagcaattttttccacactgacattctttctagcaatgaacttgtgaaatcaaatggaatttagaggtgatgctcctctgttttggaaaggtggaatgagttatccacctagaaacaaatctgatctagtcactctcctatttagagacttcttttgacttcttctctaaagaatagaatccaaatttattctcttagtttgtaagattttcttgggtcacctctctagccatgtatgtgcttcagacacactgatttcttgctgttcctcatccttgtgttttgcatcgacttttcttccactaggatgctttttgccagcttctctgcttggtgaaactcgtatgtttatagctctttgataaggctttgctcctccccctaggcacaactcctcctccttgttctctacttctattgtagtggttctgctgctatagtttaacttaccttaccagtcctaatctttcttttaattttttattgtgtaatttattgctgcatatgtattatattttacaataattaatattatatatttgttactatataatttacatatcgtaaagtacacaaatcataagtatacagttgatgtatttgccaggtctgaatttgtacctgggctgtgagccttcagagggtaggaacaatattttagtcattcttatatcaccagaggtactcaataagtacttgaatatgagcgaccactacataatttcctcagttcatctagtgtctatttctttatggaaaggggacattaacaagtatttttttgtagatgtttcaaaccaagtaatatttgtttactgtcttgctactaatctcaaaagttgagagattcaacctaaaatattgatttcctagtggcaattatagatcagtgactaaaaacaaatttcatccatttttctactcacttgataatgttttattagaaactataaatcttaagacttgaggtattaaacagcagagagatatggttaggatcaaacttccttttcctcactatttattccttatagaaaaaaagcaactaccccttcccttaaatttattattattattattatttgtgatggagtttcactctgtcacccaggctggaatgttgtggcatgatctcggctcactacaacctctgcctcagggttcaagcaattctcctgtctcagcctcctgagtaactgggattacaggcacccaccaccatgcccgactaatttttgtatttttagtagagattagatttcacgatgttgatcaggctggccttgaactcctggcctcagatgatccacctgccttagcctcccaaagtgctgggattacaggcatgagccactgcacctggcctcccttaaatttaaattcccttaaatattccttttgaaagatgctttttaccattgctaaagaagtggaatgatttcaaattaatttcaaaataatttcaaattaatttcaaaattctcccactaaaagttgctgacatattaaaggaaatgatatttatgcatgttttctaaaagctagatgtagaaaacttgctcggagtaatttgattcaacaaaagagtttagtagtttccttgaaagataatcctgaaatcaatacctttaatttacattaggcactcaaagaaaataaacacatttccctacttaaaaggctggtccaggtactttttttgtgctagaaaatcaaggctgaaatatctttactttgtattgattcagattttaaattgttctttgaaaagtatatatggaaacagatttttaaaaatgtataaatagataaacatgtataagcagagttttaaatgtatagaaaaacagatttaaaaaacatgtccaccaaatggacatcttttcctactatattcagtaacctaaatgaccctatcccttctcagcttatcttaattttagtatacagttgcccttcttccattaattaatcaataagctcattcattcacataatcagtcattgttgatgcctgttatatccaaggcactctatattctatatgctttatattctatgtactctatattctggagacatcaagatgaaaagttcagattaaaattttcctgactccatttttaaaaagttagtttttacttttatggttaattgtcttaatttaacaagtgtccatttaggatgtaatctgtgctcagtactgttgtacatcatgatctatattctctctagaagctagcattttatcccattgatttaaataatgtctaatgaattttaagttcttcatgtggttagtgttttacattttatgagtaataatgaaatggaagattcaagcaaactccattttcctgagaaatatgcatctctttatttcccaatgttaattatctaaatgctgttagttaatgctatattactacaagcttttttttaaaaaaagagacaatatcctttcttaaaagaatgttataaatataaaaaagtacttgtgttaaataaatgttattgttcatttttagagaaatcgagtgttttcttggcagagatgggagaagaaatgtaattgcttaaataattaagtattcatgcttggaaacccaacttctgttgcagggttaacatatgaactggtgattaactgacaaaaattaagcatatgtgtttggatcatggtttctgtggaggccatagatttgctttatggaaacttgagcttctgtataacagagtttgaaaccattacatgatcaggtcatttagtaggacaacccaataaaaggtaacttgaggccccatgataagaaagtgtctaagaactaagtgatatggttacttaccaattaaaatgagaaaagtcatactcttttagttttcatctgttatggtcatggggaaaatatttctttgaattcggtcctgaacccatctgagacttggggaacattagcagcttctcagtgcatactttctagggaaggagataatggaagaccctttcttcctgtcttctgtggtctctcttgggagcccaggtcttactcagaataggttctcatacttagaggaaactcagattgctttggtcttagcctgtaaatcaaagggtgaagactttttctgttttccttaagagagttctgccctcagtagagggcagagaaagaatatgtgtcattaatcacttgagaattgtttacaactataatctagagagcacttacttgcccatggcaggcagtaaagttaccttggttgtgtaagaataacctgagtggtttactcagactgttcacaaatgtttggacatcattcaagggctgtccaagtctgactagttagctttatgatatactcagatacactcagattcacctttataccatccaatcacatttaaaggagggtgtttcctgaaattgcaacattactgacttcccagccatgtgacatagcttttcagactctaagttaaattttaacccagacatctctcttcaattcaggtcacctacaggccagacaaagccaaggtcatgtattgagtgaatataaggagttttgttggttctaataactgtaatgttattcactggttgaaatactataccatggttaatcataagttgcagctgttgtgtccttttatttatgagcccttaatcaagaggacacagcaagagccactgtttgaaaggagcctttcatgaggtcttctctttgggtgctccttcttgtttcattgtgaaaagaagagaagtttatattgccttgcaaaagttattaaatagtatatgttggcttctctgaaaacagatttttctattccaaatttgaaagatcaaattataatctttatatttcagctgatgataatagaaacactaagcctgtgctctccaaacaatgtcttttaattggtgccaagtttgattgaatctcaatatcagccatcagaagttatatgttggctctctgaaaacagactttcctatccagaattcaggttttctatttgtgacaatatgtctctgctgatgttaaggtaaacagaccagagctctttgtgcagccctttttactggtcctgaacctgatgaatgagattttaaatgtaagtcaatctctctctccttttttaactttttggttttaaatcctcccttattttatgagaattcatcttatgagttacccttgttaaaatattggcatatccaggagtttgaatagggtcattttctgaatggattttggaataattacgtaaattgatttttctgatcaaggaatttagtgataggttatattttcaaatgtgttgattgtcagcttcatcctaaattgcaatgtaacacaaaagctggtacacagctcttttctttgagacactcaaaatgtttccaaactttaaattcatactttttactgataacatttttgtggatctcattcaggtaaacttttcttcttcacttgttgatcccgcgtgacccctccagccacacaggtttcatgtgcttccctgaatacagcatgcacttagcaccctttatagcctggatagtgttgttaccccagactagaattctttcctcatctccattacaatacttgacatccttcaagacaacactcaaatgctacttatatcattaaatttcctccctgatttctacttggacttaaatgttgctctttgtaccactttatttgacctgttgctgaagcacttagttcactgtaccttgtattttaattgattttgtacatgttttttccctcaacaagaagcaaacttattgaggtctgggaccatatcttcaagcagcctccagataattggcttggcacaaaattgcatgcatctcttgttttctcataactggatggaaacaatgatatttagatttatcagaactgctacagagggctaaagggatgcaaaaacacttggtaaaattcaaaattctctttaaagtagtcagtattgttctcaaaacaattacatcaaacttttagtgactgaagtgttgtaataatttgtgattttcaaagatactcaaaatttaaggtgaacagtgagccagaacacaagatgatatacctaatctcattcaccagtctgttttgaccaagtcaagttgaggcaagaatgctgggaacaagcttttctgattgaatgtgttaatttagcccgccttcaaacttcttaaccaatggcttccactctaccacctttcaacgcttttttttctgtaagatggcatgttatctgttagaaataatggggatcacattcattataccagcagtagtctctctgtgatcacactcattagactgtttactaccacgaattctgggagaaatggcctgggacattaaaagaaacaaacaagctaagagggctgtctaggaccaatgacagttattggatttgttttaagaattaagcttatgagttacacttttttcctttgcagcatagatgaaaatcatcacttgaggaacatttcaacatcatagttgcaagtataacttacacaatggaaaatgtttttcattttgagaagaggcaattgctattttgtaatggaacgcaaggactactggagataaaacttgcatgcaagaccagtacagcttgatgaagggagcagagtctagtttaacctctaaattaggagatgtttgttttaattttactgctattccaggcaagaaatattaagtgtctgctgtgttcaggactgctaaacattatggacaatacagtaatagtagaagacatggtgtctgcccttgagggagtgaaaattgaatagacaactcttaactatcaggatcaacaaaaaaatggtgttagttagggagtaataaaagtgccacacggctaactacaaaccagaaggccagggacggattactgtgaactcagctgctgtgtagctttgagtttcttgaatattgtccatgacccatttattttgttttaaatagagaattatatctgccctctaccaaatacacaggaataatctgagtaatgtttataactgtgatctgagaactttttgagtcttttgcaaatctgtaaacacagagtgagaatgagatatgacagtgtggtaaaagaggacttttgagatttattaatatttagaagtacaagggggaagaatacttttatagtatgattataatgttaaagatattcttcctttagttttataaaatgtggcttttgatcagtaagtggcaacttagaagaaaagtctatcctaagttgatttgctattccttgaccttaagaactatagaacactttattttctcctaagaccacttttttgtttttattttactccattcattaattcattcagcacataataacgaagtatgtacttggtggcaagcactgtggtaggacctggggatatgaagttgaagaagacctgggccatatctctaaaaaccttgtgaggggaaaccaagggggaaaaagtttctactattttaaataattagaatagattttattttatagttaaatttgaagaaaactacaattttagttagatttactatgccatctttactcatttgttcactcccattcgttcatttttcaagttaatgggtgctggaaacctgagtcatccttgacatgtccctttcatttgccctccaaatgcaaacaaccacctgttgtttcagtcctttcaaatgcctgcctccagaatgagcattaaatctgtcaacatatttaccatctcagcttctccagtcacctcctaactgctctcccagtttccactcttacttacctctaattaacagctttcagacttttttgaggatgacctacaattaaaaaatacatccatgatactcccagtacacatacttgtgttgctatgtatctataagtaaatccaaaatcaaagattaacagaataatacgtatcttttctcagtatcatgcattttgatatttttaaaaattatattcctggccgggcatggtagcttacacctgtaatcccagcactttgggaggctgaggcaggtggatcacctgaggtcaggagttcgagaccagcctgaccagcagggagaaaacctgtccctactaaaaatacaaaattagccaggcatggtggcacatgcctgtaaacccagctacttgggaggctgaggcaggagaatcccttgaacccaggaggcagaggttgtggtgagccgagatcacaccattgcactccagcctgggccacaagagcagagctctgtttcaaaaaaaaaaaaaaaaacaacaattaggggccaggtgcaatggctcatgcctgtaatcccagcactttgggtggatcacgaggtcaggagttcaagaccatcctggctgacaaggtgaaacactctctactaaaaatacaaaaagattagctgggcgtggtggcaggcgcctgtagtcccagctacttgggaggctgaggcaggagaatcgcttggagcttgcagtaagcagagattgcgccactgcactccagcctgggcgacagagtgagactccatctcaaaaaaaaaaaaaaaaattatattcctttgtcgctttcttgctgggcatgattaattaaattcactttatgatccattaatgatgtgaaatttactgttctaatacttttaaacacaggttgtttaaagccagggtgataggtttatattatttccctgcttaaaatgtttcattggcttctggttgtacttttagaattcaacgtagaaatcattgtatggcctacaaagtcctgcatggtcccactctgcctcctcctcactctttcctacttctccacatcttcacacaggttctttcctctccatggaataatagtcttccttccccaatcttcaccttgccaattgctattattctatgggtctctgtgtaaaaatcactcctttaagaaaattagatctccccttataattcctcttcctcctctttttattcactgtatttattataattgtataattatatatttatttgtatgacttttttatttaatattagtggcccacactagattacaggttccccaatatctaagaccagatctgttttgtttattgctatatctacaatacctggtatagtcctagcataatcagcaaatattcttggtatgaactttggatcaaatgctatgcttgccccacaaaggtgaataaaacatagactttattctcaaggagttctactcttttgacatggagtatactttgtttgaagacaggtatctaaaagacaaaacaggttaataaacatcttagaaagggtattagaatgctggaaatcctataaacaatggcttctttagtttaagactctaactggagggaagttttccttatttactcatgatactaactcaaggaaatgcaatgattttttttaaaggaagcagagatattattcttttattgaggtaaaatttctagagattgaaatgcacagatcttaagtggacaattcaatgagctttgaaaaaaatattttcttgtgttcccttccagtcaatctcaagcctccttaggcaatcactcttctgatttctatcactacagattagtttttcctgtgcttgaaactcacatacgtagaaatcaagcactgatatctggcttctttcagacggcctttctttttagatttatccatgttttgtgtgtattttttgttaattccttttttagtaatgagtagtatgccattgtaaaaatataagacaattactttttagccattcttttagggatagatatgtgggtaattttcactttagggttattatgaataatgccattatgaatatgcttatacaagttctgtttttgaaattggtgggtcagaggatagacgaatgtttaactctaaaataaagtgccaaactgtttccaaagtaggttatacaaattttccattaccaacagaaatataaaataattatgtttgttctacagtttcactaagagcttttttctttaattttagacattccagtaagcttgaaacagtcttgcactgtaattttaattttgatttcactgatgactaatgatattgaataccttttcatgtgcttattaagcactcacatattcttttgtgaagtgtttcttcaatcttttgatcagttttattggctgtttgtctttttattgttggttttggaagtttttaaaaatatattctgaatataagtcctttttcagatatatgtactataactatgtcctcgcagtccgtggcttgtcattttaccttcttactggtgtctttattgagcaagttttaattaaaatggttagttctttttatagccttttaaagaaatctttgtcaacctcatggttgcagcaatcttcttctacacctttttctagaagctttattgtttcatctcttatgtttatgatcaatcctgaattaatctctatgtgtgtcatgaggtagctatcaaggttcatttttttcccatatatttttccagcgttctctagctatcttttgaagggttttctctttttattaaattatcttggagcctttgtaaaaattatcaatttactgcatatgctttactctaactggactctccatttcgttccacagcaggatttgctatctttacaccactcctatgttgcttaggctctgaggctttatactaagtcttaatatcaggtagtgcgagttctctgactttgtgagttttttaaaaaatcaatttttttggtataaatattttgcacttcatataaattttagattcagcctgaaaattttgagaaaaaactattaagttttcactgggattgtaatgaatctgtgttgaactcagggtgaattgacatctttaataatatggaattttccatgaccatgatcatgttttctctcccaattgattaggtctcctttaatttcactcagaaatatcttatggttctcagtgcagaggattgtgatggtattttgaatgactatgaataaatttttggctgatatattaagtcaataatagatacctttgatttttattattatttctatattattatgcagttctcagccttgaagtttgaaagactttaataagacattgacaccagtctcccacttaatgctggaatgctcaattacaaatccctggcaaatgttcattagactttgaactcttccaatgctggagaaataactgttacacaaaacaccctattccatttggggacagtttgaattgttggaaacgttctttttatattgagctagttttctgcctgttgtctgccctttggagtcatggagatgagtttgccctctctcctacagagtaccctccagctattcgtagatagctaatctgcccaatgaattcttttttcttgttgaaacaattctagtttctctacttattcctcgcatgacatgatttttgtatcttttctctttctctgactcttttgacatgctccagttttctgtattttctttaacttttggcatccagaatagaagcaacactccaactgtgtccagaccagtgcagagcacagaaagactattttttttccttactctgaacactatacttctgctaatctggccttaaatatcatcagggttttcagcagccaagtcacactgttggctcatgtaatgttcactgtcagctaaaacccctagatctttttcacatgaactcttattcagactgctcattctttcatcctgaacttaggcctgtaatagttttctttcttgtgttcatgtaatagagtttacatttattcccattcagtctcagaacttcagaccaatcttctagtcagtcttttgtggagtctataggcttgacaaaagaaaaaactcagactccagtgaataccacaaacagttatttgctttaggttcaggaaatgaaaatgtgctggttttaagtttctgaagttgcctccctccttcatctcattccgtcctcccccttcagttctttggtccgagacccaatagaggatgtctacagccactctccctctagggagggcctgggtctcatcttccacccactgccattcaataatagcttgggtctgtcttggctaagccaagggaacatccagcttcactgagaaaacctttgctgcatggtgatacgccacctacttgcactgtagcgttgtctggcaggtttggcccattgtctcccagaggaaacagaaaacaactccccagcaacccgccaatctcttttgtccccacagtcgagctctggaaaatatctgaatgccacagaagtgggagtaccctttgatgtttatattggctggctccttttcctttttgctttttctttttttcatttaataatcagggtagtagaaaatgcggagaattaaccgcatgacagcagcagaggaattcattagagaaacagagatgaattctgctcagatttcaggctctcaggcagaagacacaaaggagtaatcgtcttctagttttttttaatcatttcttttgtggcaccttccttgtccatgaaggcaatctcagcgtctggcatgggggagcccaagaacataggcagtgcaaatggtggctttgatttggggattattacagcaatattaaccacttccttcttacctctctttgaaaagatggagcttgtcattcttggagaaggcagtgaacagtgctatgttattgcttttatttaaagtattacccactaaaacttcattttaaaattgggaaaaatgtgcataacattttactatggaaaattcttgaacagagcaaaaaatgctgaggaatataattttgcaaatgtgttctcttctaacttaatatcctcagagacccttccttttatgagcctcaaagacagctttagtgatggcttacacaaaactaagtaaatttacgcatacaattttacttgaaggaagttggtaaaataaatcaataatttttttttcttcttgagacagagtgtcactctgtcacccaggctggagtgcagtggtgtgatcacggctcactgtagcctcaaccttgcaggttcaagtgatcctcccacctcagcctcccaagtaactgggatcacaggcatgtgccactatgcctagctaatttttttttttatttttagtagagatgaggtctcgctatgttgcccaggccggtctcaaactcctggactcgagcaatcctcccgccttggtctcccaaagtgggattacaggtgtaagctaccatgcccatccacatggttttttctataattgtacaaaggcagcagctggatccccagaagctactggtaatactaagatttccctcccaaagtcgaaagtagtcctgattgctttgcttaagtagtagagtttcattactattttaattcctcatgaattttttaaaaaatacaaatcatattcggagtttcatattgaaattatttaagagaaaatttttttctcaagtactgttacacactttaaaagcgtgtatgtaatttattgattttataaatataaatgatttgcatcttatgagagcaagttctataaagctctttcttggttacaatttttagcatggttttatttttaagtaaacatatctacctgaaagcaatgaaaagaacagttttgaatcttagtgatatttctggaaagagaactcattaacctgaagtactcatgcatataattaatttaaaaaccatttggttttaaccttaagctaatccaatcaacttgtgctttcatcaaacatttaaggcctaacagggacaggtctggtatcacaaaaactttcccagggaatactcttcttatggctcatcttaggacataggctgtagaactatgtcctagaaccagaccattagcaagtaagtcaccttttcataccatgtttctcctacctgtcaagcgaagatgcaggcacttgccacctgtcaatgggagaaaatactgtatatcaatcttttttatatcagtgataaggaggaaggatagtgatgactgtggcctgtagagggtatagggaaggctctgtggaagaggagagatttaaataaggcttacaagaatatgtaggatgttagtcaatgaccgttttttgagaatattgataaaaaggcatttaagatatgttgcctgcttctgatttggattggcatagaaaaggcatgaagacaacatcagaaagggagtaaaagcacaggtgtgtcaaagcacatgcaggcatatcttggagatattgagggattggttccagaccaccacaataaagtgaatatggagaaaaactgaatattgtaataaaggtactcacacaatttttttggtttcctagtgcatatcaaagttatgttaatgctatactgtagactcttaagtgtacagtaccattatgtctaaaaaaccaatgtatatactttaattaaaaataatttattgctaaaaaatgctaataatcatctgagccttcagtgagttgtaatctttttgctggtggagtgttttgcctggatgttagtggctgctctctgatcacggtggtggttactgaaggttggggtggatgtgccactttctcaaaacaagtcaacagtgaagtttactgcattaatagactcttcctttcatgaaatattgctctatagcatgtcataatgtttgataacacttaacccatagtagaactttaaaaatttgagtcagtcctctcaaaccctgctgttgccttatcaactacgtttatataatattctgaatcctttgttgtcatttcaatgatgttcacagcaccttcaccaggagtagatcccatctcaagaaactactttctttgttcattcatatgaagcaacgtcttttttttttttttttttttttttttgagacggagttttgctcttgttgcccaggctggagtgcaatggtgtgatcttggttcaccgcagcctctgcttcccgggttaaagcgattctcctgcctcagcctcctcagtagctgggattacaggtgtgtgcctccacacctggctaattttgtatttttagtagagacggggtttctccatgttggtcaggctggtctcgaactcccaacctcaggtgatctgcccacctcagcctcacaaagtgctgggattacaagcatgagccactgcgcccaggcatgaatcaacttctcatcagattttatcatgagattgcagcaattcagtcacagcttcaggctctacttctaattctagttcttttactatttccttcacatctgcagtgacttcatccagtcttaaacccctcagagtcatccctgagggttggaatcagtttctttaaaactcctgtttatgctgatattttgacctcctcccatgaatcatgaatgttcttaatggcacctagaattgtgaatcttttccagaacgttcccaatttatatattttgtgaagatccatcaggggaatcactatctgtggcagctataaccttacaaaaatttatttcttaaatattaagacttgaatgttgaaattattcctcgacacatgggatacagaatcaggcatgaaaacaaccttaatcttatgtatctccatcagagctcttgggtgactaggaacattgtcaatgagcagtactattttgaaagaaatctttttctctgagcagtaggtctcaacagtgtgtttaaaatattcattaagacatactgtaaacagatgtgctgccatccagactttgtcgttccacttctagagcacaggcaaagtagcttttgcataaatcttagggactctgggttttcagaatggtaaatgatcattggcttcaagttagagtcatcagctgcattagcccctaccgagagagtcagcctgtcttttgaagctctgaagctaggcattgacttctgctcttgagctttgacagtctgagatggcaccttcttccaatatgaggctattttgtctacatgaaaaatctgttgtttagttgagtcgccttcatcaatgatcttagctagatcttctggataaatttctgcaacttctacatcagcacttgctgcttcactttgtatttgtatgttacagaggtggcctctttccttaaacaactcatgaagcaacccctgctaacttccaacttttcttctgcagctttctgatctctttcagcctttgtagaattgaagagttaagcccttgctctggattagactttggcttaagggaatgttgtggctggtttggtcttctagctaaactactaaaattctccctatgagcaataaggttgttttgccttcttatcattcatgtgttcattggagtagcacttctaatttccttcatgaacttttgctttgcattcataacttggccaactgtttggcacaagaggcctagcttcctgcctgattcagcttttgactttccctcactaagctaaattatctctaacttttgatttaaaatgagagaagtgtgattctttctttcacttgaacacttagaggctattgtaaggttattaattgaactaatttcaatattggtattgtctcagggaatagagaggcccaaggagtgggaaaaagatggggaaatagctggccaatggagcagtcagaatacacatatttatcaattaaatttgctgtcatatatgagtgtagttcatggcacccacaaacaatgacaagaataacatcaaagatcactgatcacaggtcaccataataacataatcataattgaaaaagttagaaatattgtgagaattaccaaatatcacacagagacatgcatgagcacatgctattggaaaaatggcactaatagacttgtttgatgcagagttgccacaaccttcaatttgtaaaagttgaagtatctgtgaagcacgataaagtggagtacaataaagtaaggtatgtctctagtgtgtttgtgtacattaagtggtggaagatgtgatttaattttttaaaaaatagccgtttaccctagataaatcagtaagagatgagtacaagtatgtatctacaaattatttttatttgtgctctttataagaattaaaaattgaaaaactcccaaataattaatgaagtaaattatctttcaagtatacactgtattgttctatagctattaaaaatcatattgtataaaaatatttattcaaatggggaaatactcatgatataggaagaagtgaaaagtaggttataaaacagaatgtatagtatggtccccattttgggaaatatatttacacttatgacaataaaaaaatcagacaggatacataatgagttgttagcagtggttatatatactctgagaccatgagttattttgatttttgagaggcgagtgtgcttgttggtgttttcaactctttcctaccataaaatgtattaattcactattcaatttttttaagttctaagaagttagacacttatttattttaggtgttatacagtccatagtggaaatttgagatgagtgacagaatgaaaataatatggttgcagacaaatgtgataaatatgtgtaagatgtttttgaatagacaaagcctattttaggagtgatgaattgtagcaataatttattgtaaaatgatagatgtttgaaatagggtgggagtggtaggaattcaaaggaagggatagatatgaaacatgaaggatgaatgggcagtatgtggtgaaatggctctgagaggtgagagagagaagactcttgaggacaagtgcaatgtttcaacctgcttaggataataaagccaataaaagatagagacagcttgtttgggggctgagataaaaggtttcaatccaggcttttttggttgttttttgtgttgttttcttttcttttcttttcttttttttttactttttatttggaagtaagaaagttgcaagaatgaaaacagtccacataacagtcaaatacctttacccatattcacctgttgctaatattttaccacatttgctttataatttactcgatctacatatgcatatatatgtataatatttttctgagccatttgaggctaaattacattcatcatgattctatacccccaaatacttcggtgtggtatttccaagaaaggggatattctgttatataaccttagtagagttatcaactttggtaaatttgattaaatacttctatctaatctaccatttatatgccagttttgtcagttggctcaaagatacaatagtgttgtttatagcactttttccctccagcataggatccagcataggattaggtattgcctttagttgtcatgttcctttagtctcctttaatctggaacatgtctacagcctttatcttttatgactttgtcagttttaaagaatttaagccccccctcttgctttttaaaaatttgtctgatgtttccttatgattagaatcaggttatgccttgtcatccaggtgatgttttgtccttgagttatcacatctgcaggcacataatgtccatctcccactcatggtgatgtaaattttgatctccaggtcaaggcattgtctaatttttcctttgtgtaggtactgtttttcctttaaaagcactgagtaatcagtgggaaacaaatagcttgctcttcatcactacccccaaatttattatctgttgatgattcttgtatagtccaaactttataagatgactgaaaaatcatgattttccatctttgacattccttccacattcgcctgtcaacagtagacattttctaataagcaggagctttttcttctctccatccaaacatgcatctcttaccagtttgtactggtcatggaatccactgttcttttcagtggttgatactgtaccagatcattttggtatataaactgtctcagatttagccagtatgttctggtatcatatctccaccgtctatttttttttttttaacacttccttgatttttggcataagttattctaggcacaccttgtacctactctgcctaagctctgaaatcacccattttcccaagaaaccccagttctttttttttttttttttttgagacggagtctcactctgtcacccaggcggttatgcagtggcgcgatctcggctcactgcaagccccgcctcccgggttcatgccattctcctgcctcagcctcccaagtagctgggactacaggcgcccgccaacgcgcccggctaatttttttatatttttagtagagacagggtttcaccctgttagccaggatagtctcgatctcctgacctcatgatccgcccgccttggcctcccaaagtgctgggattacaggcttgagccaccgcacccggccaccccagttcttttctggtggaaatagtgttaaagactaagttctgggcataggtgtgctcattactattgaggtatcttggctcttggctctttcagtgaagtgaacttggggaaaaatacacacacacacacacatacatatatatataaatacacacacatatacacctacatatgcatatatgcatattttagaaatcatgaattgattcattgatatctccaattttaattcattcccacaggtttcttacttgcccaattcagttttacatggcttctgaatttgaaataataaggcaaaatggtagagatgttcagcttgcagtgggggaagatagaaaatcgaaattcacatgacagggtgaagcatagtgattaagattaggaagtcatccacacagagttaggagaaaatacatctagagtttgccaaatccaaaggcaagactgtaagaaaaagatactaaaagagaaaagagcagaggatgtctctgcattttgtgatacattaaaaagttatggtaggagaaggagataaattaagaatagcctggggaaagagatgtagagagtgaagtcaaagaagcaggggagccagtactaggtagagtcatggtggtcaggattagaaagaattccagcagtccaatactgcagaatagtcaaggaaaattgaagaccgagactgggcctttggatttgatatttggttaccaaaggtttttaaatctggatttaggaactcatttgagattttttttttgagaatataacttttaaataacaagtcagctcacgttaattaatgtttaatgttttggggacatttacatttagcttttcttaaccttttaaatgtgttcactaaatattattttatttctaactgcaggctaagcaagttatactgtgtgtataaagtgcccaagtctaagaggcattgtagacaggctatttttagggaaactcatgtttttctttaaaagttcagctagcatttggaatcgatatacagtataatatttaaaaaaaaaaacaacatatttcctcatcccccaagaggtttcttaaaatagcatgtaatcttacctacagtgggaaaagcctcaaattttataaattgggttggatctaacccagattacctgaccaagagagtccccaagaaaaacaaggtgtggtaaaggttatagtaatggtaattaagaaagttgtgttgtgcctgctgggcctcactaaaagcaatgacccagcctgtggctactggcatcattttgactgctgagacatgctttcttttggagagaagtccaaaccaaatctttgcccactttgaaagccaagatattctcattcctttcagccacagaaagggctggtttttctaacaggatcatgtccgtgtgaccttctgatgtatcaacttgttttctatgcagtatataaacaataaagggtttaattttagttgcttttcttcacagagtcatggaatattacaaatgttagaagctagagaggatctttgaggttatctgctttaagccccttgctttccacaggaaaacaccaaggctcagagagataaaatgtgtccatgctggacacagctggaaaatgatagagcttgaactcaggttaactgaccctccatgcaggtctgtggctgcaccatacattacagcatctctattcaacagtaaaactcattggggttatatattataccctagtggatattacatctgtgggatgacaagctgcattatgatagagttgcactgtgctcagcagcagttgagtagccagcacccacaggcaacctctatgggcaatctgaaagtgaaatctttactgaattgaatggaatctgtggagatcttcgatagtcttcccttgaggtgaaatcttgttttgttgagtggtttaagatgttttctagggtgtagcactttgcagaagtgctttcctctttcatgataggtgacccagtttggagatcaggaagattttgtcatccttcacattgcaagacttgaagacttgcaactcaaaatggtatatttttttcttttcttccaatagagaacaattccactctagcactcaagtatctaatacttttgggacatgttgaaactgtttccatttcatctgatttcactcagcaattatttatagaactctctgtgaggtaggcaccatgctaagtatcctgaggctgacaaagacatcctttctaagttgaggcagtgacagagggcacagcagccattgctaattgtccttgctgcagccttgttgggtgacacctctggcttccagggcctcatattttcacagcttcactgataactctctgagaggaattgtccctcccactaagattcccttctagaagatgagtttttccatgagcattttaaaattttctttgttgccttgttcatttttttttccaacatttaaaagagcagaagtgagggcgaagagaaaggagaatatttagatctgaaaaatgcaccagtccacttttaatctacttttgggaagatgattgtaagatattctgtacccacttagggatctcctgcccttcggatacacatgccttaactaccatcttgctagaatagaaggtcctgtgtttaggcatcaaagaaaggaattgcactgagaaattttagtgataattcttttattgtaatcgtgattttcttcctcctgctaatctttttaagtggtattaaaggaagcttcttgccaggcagtaatattcctccatgagcacacgatctttttccttatttggcactggaatttcatcaggctgtattagtctgagcgaaacatactctaggaataccttttttttttttttttgagacagagtcttactctgtcacccaggctggagtgcagtggcgccatctcagctcactgcaacctccgccacccgggttcaagtgattttcctgcctcagcctcctgaggagctaggacaacaggcgtacgccaccatgcccagctaatttttgtatttttagtagagacaggatttcaccatgttggccaggctggtctctaactcctgacctgaggtaatcacctgcctcagcctcccaaagtgctaggattacaggtgtgagccaccgcacccagccaggaatatctttagaatagttctatagttaggaacgttgagaccaggtaacaagggatttattcaatgggatgacaatttttatacaccatgcctgaagcaaataaaggtgatcagtatttatattgcagtattcaaatactctggagccaaatagataggactaccttaaaaatgttcttgtacatgtgggtttgatcttaaagatattagggatggtaacataccattctatgtatatacatgaccaggccttaggttacttaagggtgatggaatgaccattgtgtgtgtcttgtgtcttggtggccttcagtgaattctgcatgagctctagtagtaactgccactgctgtagtatcatggaaaaaacactgaacttaaaatagttttcttacctgtaacaaaatggacaacaatctcacagagtttgtgtgagaattaaaggagaaaatacttgggaagaagtgctttgaaatctccattgcactctgcaaaagcaaggaaatgcgcttgtgatcagtatcatgttgacgtggagtgagttactccccagctgttcacgatatggtcgcccacaaagagcaagtaggtcacttcaccaaacagaattctgtatgtattacagaaactcccaggctgagtcaccaagtaaaatgaagggcagtgtgctctatttaaaatgttcatttcattttcgcattccattctttactaacagaatggtttcacttcatttccagtcactttcattttcaggttgtcaagcttcacttagtgtcagttgtgttcccacactcaaacatgtgccttgtcttccttgatcttctctctgaggatgtttctctgactaatgtgctgtggtcagaacaagagcattgccacatggtgcatttcctaggtaggcatgtctaaaatcattaagtggcctagctcagaacattctttgtgaccctttcccctccccacccagtgcctagtgactgatttatctgaatataaggctacttccacttttagttcaagggccttgctccctgcctgcaagaatctctctaatcacattgccctccctccacccgctttccccattgaaaccaatgtttggagaagatagaagaatgaaaagaacatctcaggtcctgtttttgtaccaccttcactattgtagcacctcttttgtgttgccaactgaatatggtatacatggctttaagggggaaaaaagaaaaataaaacataagaaagtaggagagctcctagctttcttaaatgaattaaaggccttaggccagagtgaattatattatagattgtagactagatatggtggggaaggttactcaacaacttggttgggaaataaattaatatataaaaccatcagatatcagagcatagttgtggaaagtcacctaaggaaagtcattgtctctaggccaaagactggcctagacgtaagtaatgcaccagtgtgtcagaaagggggttggtcgacatcagaagcacccagaggcaaacactggttgtgccctgtacccacagtaactgtccatagaaatgtgaatgttggtagtcttcaaagtttcagtgtcactggcaagtccttctttgttggaaattcaatttaacattcaagttctatagcaaatgcctcctattatgatgtcttgtgtttacagtttgcctctgtaagtagaaccctctaaagggaaaaatgctctggtcagattgttatggtctgtatgacagatacataactgttgtaaatcaacacattggcattctcgtttgctccaccagtttgttgtgaacttcgtcaggggaaggcatcatgcctaagtctattcaactctgggatactgacaaggtcaaatttctgtgcctgcaaggctgggactggacccaagctgtacagttcatacaatgaaatagtgccatttagtaaaaaagggagataatatggcacttggttggaagtttggctctagaatctgattgaactgggtttgaatactaggtcagccacttacatgctgtatgacctaagaccccgctctaaaaaggatattatctttacactgacctcagagggctgttttgagaattaaattagacaatccatgtaaaatacttgactcagagccttacatagagctgttagcagcagcaacaacagcagcaccagcagcaaggtaaataccaccatgtgtgtcctttgggtggtcagcagtttgctgaacaatttggactggtttagaaccctcctaactcactactggggactttccattggaaccacagcactgggtagtgacagaatttgccagtgtaatcacatcatttatgagaaatgatagcaatagggtttggtgtcatagtaatggaaaatggcactggacactatcctaattttgaagaaatggagtgaagaagaagacatgttccagaatgcacaggacattgatcttcagcaaatttttagagtggattactgaatgattacgtgtgagaaaaatgtgattattaggagtcaatatgagctcattgaaaacaaaacattcctatttctaacatccttaaagtctttcacagttcatcttattggttatggaaatgtcaagggatagatttttatttctgggaggagtttggctaagatttttatgatactcttgttgtcttgttgaggttaagtagattcatagctggttgaacaaatgtccactggcagttttgacctgatggatggactaatgtccatctggagaggggtcctcagggtaagcctcaggaacctgtctagtgatgctgttctatccaattttctcattaaaaatttctgacgaaagcacaaataatgtgcttttgcaacaagtgagataggattttttaaagatctgtgtaggttgatgggcggatttgctaataacaaccatatgtagcatttattgagtacttactgtgtgccaggcaaaatgctaaatgtgttgtatgacttctctcatttaatcctcacagtgaccctctgaggtgtatactagtaatattccattctatagatagatgtagaggcacagatatgctaagtcatttacccaagtcccacagccaataagaggcacagatggcagaggaccatttgtctatcaccaaagcccatgctcataactgtattatgctactagaaccagtgagtcagaattttacacagattaatgtaaagtcctaagctaaggttaacaaaatagtatgttaagtcttgaaggaggaagcttaggttgatagcaagtaataaggaaaagatttagggacattagttggtgggaaactcaatgtgattcaatactaacgtatacctacttttaaaaaagaacaactaataggagggtgcattattagaatatagcatcatggatcatggtggcagtagttcttctctaagagtccatgtccagagtactaggtcaggtctgtcattaagggggtccttgaccattataatcaggagaataagaggtctggatttacatcctaagaggaaaaacggtgaactaatgtcaggctggaaaagagaaaaaccaaagaggaatatgaagacaaccttcaaatattaacatagttacatgatgagaaagagtagatgccattggtgtctaagagagtaaaaaaatcacttctcattccctgttgagaaatggactctggcatcaggttgatggagaacaaaatgtcagctttattccagtaaaaccatattagagaatgtggcctgatctgtggctacaatcaggccttttatacccttccctagttaaacacactctcagagtcaggtaaggccctggacaactgttgtttgcaggaggagggcagttcctgtgtgaaggagaaggagaaagtgtgcatcctgaagccaggggtgcacctgacttctcgactgtgaatgagagaggaggaaacctagttcatatctgcacaaaaattctttttggtatccttgaagtgggctgaaacaaaaaagatcaaaatgttactctagcaggaggccactcatggaaaccttaggcaggggaattgtgttacccctggtacttaccaactttaacttcagtggggcaaccaagccaatggagcactcttatctctgaaatgtttggcctctgtacagaatgatgtgaaaaagaatcttctagcatggggaggtggaggggagggatgtctagattacttctacggcccccactccctaagattcttttgaaatcagttaagacacgcataaataaaaaaactccaagtaaagcatgtcagtattttaaaggcttatttgtttgagcaatgagagatgatcagtgttctaagtgctatggttcatcatgttctggaggtggctttgttccaactgtttgttcacgagtgttttgagttaaagggaattacagtctacaaatttatgcacatggcacttcacagaatagaagaggccaacttctggcctcttatacccacatgcaacaaatacagctcgtgtccttcccccaggactcaatttgtaagcctctttattgcattgtgctgtagtaaaaaattctcagttttgtgggcaacctgtgaaaccagccttcttttatttcaactttgttgttttgcctttatactgtgaattaaatgaatccttgggggttctaattatattatggaaaaaagaacttgatattctgagaagctgaagaacaatttgttttcctcagctaggtatttaggacttttaggatttagttaccattttcaaaaaacttgaagaagattaattatctccattgcctcaaatgacaaagatagtatgttcaattctctcctgagttatcatcataataaccctatattcttaatatggccttttatattttacaaagtttctcaatagggaatgagaagaaagtgattttttaatctcttagacaccaatggcgtctactctcccttatcatataactatcttaatatttgaaggttgttttcatcttcctcttcagtttttctcttttctcttttaccacaataatcatcacaaataatcctgtttggaaggtggagaagaggaagcaagacagatattattgtacccatttcagaaataaggagaatggaactcagagagtggtggtgggaacaattaacaaatgttttctgagcaccaatctgttccaactacctgcagtagtgcatttaatccttataatagttccgggagttaggtgctattatccccattttgagatgaggaaactgtggctcaaagtgttagttgcccaaggtcatgcagtattaagtagaagaaccaaaattagacccaggctttctggttctgaaatccatactcttaagcactaggttgttaccactggagaggttatgaacgtgcccaaaggcactggctgcctagtagctgaggcagggccagaacctgtctttagactgcttagcacatcttctagatcctgtagctgcttcactggttttcattaactttggggtttttcaatacaaaaagaggaaacaaatgaaagctgagccgaattttgcttttgtaacatagaggaacttactcagtaccaaggataatctgaggctcttatgggatttttttaagtgcccagtgttgtttcatattctgtttattcttcaccaccaccaccagtaaatgcaggtggttcttgtctcatagtgattcacatgtgggtttatgccaggtacacctattttactacttttggcatttataagggcaatatgtttctgaactaatttggggaaaataagttcttatattaattgtagcagaaaaacaaatgggaaagtcagtgaggttcaatgcaaagagctcagaccaacctttggcatcagcccaagcagagttggaaatcccagcttagtctcttcctaaaagagggactttaagtgagttactgaagctctctaaaaacctatttctttattttaaactggagataacacttgactcatgcgttgcgtttgttagagagaacaaatgaaaaaggtcgttaagggtttattggcagtgaactgtatggtaggtgctgtgcttgtgtttgcttcacttaatcctcatgacagccctaggagataggtattattatcacctcctgacagttaaggaaattgaatcttaaggacatgtgataactttcctaaagtgaactctaccttaatgtgttggaaaagagtgtagcaaatcaaatatatcattcagtttctccaaagccatgaaatgtctttaagtctccctgaaagatttcccaaataaggctgtcaaagtcttcttaaagaatcccatctaagttctattatcccagtggttcctttatctttttatttcttgccataaaattaaatctagaattacaaagaagtatttcaaagtatatataatattcctctgttttatggatttacatatcacctcctccatcagcagggattaggaggggtgtaaatacttggatagggctcttttccttggacttcctcacctccatcaacaggggtcaagaggagcctggacagtaatccctgtccgacccccctctcagcctaatcactactatttgcctcaaacaatcttatttcatgaggcctttgatcaatgttgagattagtcactgtaagaagcctgacttgtaggaaaccttttacctcccagactctaattcttctattccgtttctccccaagtcctgtgtcctctggaattcagaatctgtcattggcaagatctcctgtgttctcaaccccttctcagaacagtcctttcaccttcccactctaaactgaactgtggctgtcgcctaaggatgctgcctcccctgctgctctcctaagtggtggtagtgttatcttccccagtctcctatgacaaggcctggaggtgggctaggtgtcctctttcttgttccccactgctgctttcagaccattcttcatctcctcttttctaaatccagccctcctcccccttaaaatcttatgttatcagttatctatagacctctgtgagcttaatcctacgcaatgtaaaggcatatctttctggccaatcaatatggagtttatggcacttttataaagaaagtggataatggcctcctgatcaagaacataactgctattttcattagtcggtactctatgatgcgggtgcatggtccaggggaagtgggttcaggcccatcagactgactgagagttgagttctttacccactcagagtcaagaattgtggtatggggggaagcactgtgtgaagcatcctacaggggtctgttctgaacactgaaaatgtacagtccctgtcccagagtggcattctcaagatttttttcttgatgggacttgtgtggctatgggccaaattaaatttaatataagcctgactctcatagcctttgtagaggaatgaaaccagaagaatttggagcagagagtcgggcactcatagaatatttttctaaaacagaggaagtcatggaagactcagggtctagagtataaagtgtttgttacttaactttgaaaggacaactttgtataatttagcaaagccttcttgtttaagattagtctctaataagtaagagggccttgctggatttcttcataattctcagtagttaccagaagtcagaactattccttatctgtaagtaacaggtctttagattatagacctagtggggatataactttaatgttgtacagttaaatcaacttcacactatttacaagacatgtcatacaacactgaaaacaagaaattagagtatgtggaaactatgctactaaaattaagcagcataaggaaaattaatgtaagcctataagtcacagcttgacttctgtttcagcagctgacccagaggcaatgaagccaaaaacaattttaagacctgttctgttctgacttgtaaagattatttgatgttaaccccatacccttatcccctttccaagtgagtaccaggggttaggaaaaagatataatattgcctggctcatttctaatcaaactttaatgctggcttcagcaaggccagatgcctactttttgtaaatatcattggcagttggcagtacatttcattaacagtttttatggctatcagtagtatttttgatactctgaggatgagcactagagaaatatgtgcttgctgaaaagcctgctaatctctgtgtgataacttaattttgctattacctgaatgtaagtgctattgatgtggcattagcattgatttcatagctatttaataaagagacagaaacttcaaatgcataattatgacatcaatatatgaatctttctttagagatgaaaaacacatagttaaaaactgtgaaaaactgccctgcttatatcagaaaacttatacttctctgttgaaaaaataggcaactaaaatagtttacaatataatctaaaaggatgaattggtggaattttcagtataactggaaggtatgatgtgttagatagtggggagagtgtatatatattatcaagccacaatattacaacctgacactattagatataatagattatgcagccaaaaatgtggtcatggacagtgataggggagcagaatggttcggtaaagtaccaagtctggtgacaggacaatgggaaaatttctgcagcctgatggtctgggtagttggatataagtctgacagcagagatactttcatatttagggaaaacctgcaaaatactgaaaagattaataaagagaaagggaacttctaaatagctaaaactcccggcagagcagcatagctgacagagcaccataatcttgcgtatcagagcttctcaattcctttggaacaggagaatttgataatttttttctcccatgaggatgcactatgaaggaaaccgctaggaaattggaattattttaaagtgattattttaacattaacttggtagacttcatctattccatagcatttcttttcttttatcccattcaattgcatcctctctataggattaatgcactcttgaaagtgtcaccttctagccagtggccaactaacacaaaaccaattcactaaacaaaaacacaacaaaggaccctcagagagtccacttcactccctgctacctccactggagcaggtactggtatcctcggctgcaagacctgaagacagatcacatcacaggacgctttgcagacactcgccagtaccaacccagagcccaagagctccactagatggctaggcccagaagagccaaaacaatcactagagtttggctctcaggaagccgcattcctgagagcggagcaccacctaagggagcaccccgtgtcccaaagaatctgaacagcagcccttgaatcccagatcttacctctgacatcgtctacccaaatgagaaggaactagaaaaacaattctggtaatatgacaaaatgaggttctttaacacccccaaaagatcatactggctcaccagcaattgattcaaaccaaggtgaaatctctgaattgccagaataataactataataattcagaaagtgaattattaagctaatcaaggaggcaccagagaaaggtgaagtccaacttaaagaaatcaaaaacatgatacaggatatgaaaggaaaattcttcagtgaaataaatagcataaataaaaaactctcacaacatctggaaatcaaggacacacttagagaaatgaagtcccagcaatagaatcaaacaagcagaaaaaagaccttcagagctcaaagacaaggttttcaaattaacccaatccatcaaagtcaaagaaaaaagaatttttaaaactgaacaaagcctccaagaaatttggtactatgctaagcatccaaacctaagaataattggtgttcccaagaaagaagagaaatctgaaagtttagaaagcgtatttgaggggataattgaggattaagtgggtttcagatgcagagatggtttaacatatgtcagtcaataaatgtgatataccacataaacagaaataaaattaaaaatcacatgatcacctcaagagacacagaaaaagcatttgacaaaatccagcatccctttatgattaataccctcagcaaaatcggcatagaagggacacaccttaaggtaatataagccgtctatgacacacacacagccaacattatactgaacagggataagttgaaagcatccctcatgagaactggaataagacaaagatgcccactttcaccgcttctattcaacatagtactggaagtcctagccagagcagttagacaaataaatggcatccaagtcagtaaagaggaagttaaaccattgctatttgccaatgatatgatggtatacctagaaaacccaaaaagactcatccaaaaagctcttagaactgataaatgaattcagcaaagtttcaagacacaaaattaacatacacaaatcagtagctctgctatacaccaacagcagccaagctgagaatcaaatcaagaactcaaccccggccaggcatggtggctcacacctgtaatcccagcactttgggaggccgaggcaggcagatcacgaggtcaggagatcgagaccatcctggccaacgtggtgaaaccctgtctttactaaaaatacaaaaattagctgggcatggtggcgcacacctgtagtcccagttactcaggaggctgaggcaggagaatcacttgaacctgggaggcagaggtagtgagcagagatcacgccactgcactcaatatgtgaaaatgaccatactgccaaaagccctctgcaaattaaatgcaattcccattaaaataccaccaacattcttcacagaactagaaaaaacaatcctgaaattcacatggaaccaaaaaagagcctgtgagtcaaagcaatactaagcataaagaacaaatctggaggcatcacattacccaacttcaaactataagggcatagtcaccaagacagcatggtactggtataaaaatagacacatagaccaatgaaacagaatagagaacccagaaataaagacaaatacttacagccaaccgatctttgacaaagcaaacaaaaacataaagtgggaaaaggacaccctattcaacaaatggtgctgggataattggcaagccacatgtaggagaatgaaactggatcctcatctctaaccttatacaaaaatcaactgaagatggatcaaagacttaaagacctgaaaccataaagattctagaagataacatcagaaaaacccttctagacactggcttaggcaaagacttcatgaccaagaacccaaaagcaaatgcaacaaaaacaaagacaaatagatgggactcaattaaactaaaaagcttcttcacagcaaaagaaataatcaacagagttaacaaacaacccacagagtgggagaaaatctttacaaaatctatacatgtgacaaaggactaatatccagaatctaaaaagaactcaaacaaatcatcaagaaaaaacaaacaattccatcaaaaagtgggctaaggacatgaatagacaattctgaaaagaagatatacaaatggccaataagcatatggaaaaaatgctcaacaccactaattatcagggaaatgcaaatcaaaaccacgacgtgataccacctcactcctgcaagaatggccataatcaaaacataaaaaaataatagatgttggcatggatgcggtgaaaagggaacacttttacactgttggttggaatgtaaaatagtgcaaccactagggaaaacaatgtggagattccttaaagaactaaaagtagatctaccatttgatccagccatcccactactaggaaaagaagtcattatataaaaaagatacttgcacatgtgtgtttatggcagcacagtttgcaattgcaaaaatatggaaccagctaaaatgcccatcagtcaatgagtatacaaggaaatgtggtatatgtatataccatggagtactactcagccataaaaaggaatgaaataacggcattcacagcaacctcgatgaaattggagactattattctaagtgaagtaactcaggaatgtaaaaccaaatattgaatgttctcactcatatgtgggagctaagctaggaggacacaaaggcataagaatgatgcatgggactttggggacttgcgggaaaaggttggggtggcgagagataaaagagttcacattaggtacagtgtacactgcttgggtgatgggtgcaccaaaatttcagaaatcaccaccaaggaacttactcatgtaaccaaacacctctgttccccaaaaacctattgaaataaaaaaaataaattaataaattaatgtttgtgttattcaaatacccataggagaagtaatctccttgagactggagctccattttcttcacttttctatgcctggaaatacctcacaaaatgactacagagtagttacccaagaggtatttgttgactcgttatctcttacagaattttagataccatctatacttcttttcttactgtacattttccctgggtgagctctcatttattcctgcggatgcacacataccctgaccagtcacagatctctacctccagctcaggctcttctcctgagctccagccccacgtgtccaagtgtctgctgggaatctcctagatgttgtgggctaactccaactcagaatgcccatgtctgaactgttagtatttctttccagaatggccatttcttacacttcccctaccttggctaacaggaaaatcgttatctactcagttgcctaaatcacaattttgaggcgtagaaactttccctcgtcctttcctcccatttttaatcaaacatgtttacattcttctttttccttctggtttaggatctcctccaagacggtttctgtctcattacttattagccttgcctaggccaaggcttgatttaggatatgtatgtttttaatacatgtctaatgaatgggaattttttgtagcttttagattttctgttgagaaacacacataaacacatactcacaaacacgtgtgtgcctggaagcacatacatgtagtattcacccaagtcgtccaagttcactgagtcctgtccagacctttaattctctcagtttatttgtgagattgttgtgtggcacaagcttacaggcatgtgtaattgttaagggaatatggattgagaactctgccatgataactcatagctccttctgggtagttaagccttacatcccattctgccaaacccttctcagacattcaaccattttctttctcccttgttaacaaattttttaaaatattttttaaaaggaaagaaaagaaaatcctaccttatgaaatcatcttggccttgatgagaatcttggccttgatgagcttagattctcaattgactattttccattctgtcactaagatgtatttggaaaacaacaaataacccctgagccctgctattgtttctttatggtttatgtttcatgctgtgctgcttagccagcagggagggaggcttaactgacaaacccagtttttgtagctgtgctgatatcatccacaattcaaagccacagtgaaaaattacaaatcagcctcagccatgtttttttgttgttcttcttactgagaaacacacatgcacagacaaagaagttccatgtttgctgagtgggaccaagcaatcttggtgtagaatgaagaaaaaatggtgaaactatggagggtgaaattatttaaactgtaaaaagcaaatgactttgttttccggatcttttataccacctcctttgatgcagcctgcttcctgcatgaagcctgttttgtttgttacttgttttcttatcctgagattgcgctaaaattgcatgactctgttacaattcttggataacttttcaagaaccactttggaaaaattattgtacaatagtatctctctggaatccagttttattctctcccagtcacttactttgccaatggcccattagctgtgtaagtgatgtagctcttccttttttcactcatggattacttctgcttggcatatcttctttcaccttgagcagcagtcaaaattttacttatttcttaatattcaacttaaatatcacctttgtgaaaagcctttcgggttcatattattatgatctattcatatttattcagttctctagtaagtactgtatgcataagtaggcatctgataaatatttattaagttgatattaacatatggcttaagaaattgctaattttataatacagtagttttattttttatgcaaacaacaaaagacatcttaaaaagctattcttttttttttgagaaggagagtctcactgtgttgcccaggctggagtacagtggcgcagtcttggctcactgcaacctctacctcccaggctcaagcaattctctgcctcagcctcccgagtagctgggattacaggtgtccgctgccacgcccagctaatttcatatttttagtagagacggggtttcaccatcttgaccaggctggtcttgaactcctgatctcgtgatccacccacctcggcctcccaaagtgctgggattacagatgtgagccactgcgcccggcccaaaaagctattttctttttaagcctcaacaatacatattaaaaaatacaagagaaagaatgtttgttaagaaaaaaatttagacatacaagtgtgcaatttagagaaactttttttctaaaatattataaatttagaaaaattttgcaaacagaaaacactgtagggacaatatatgataagtaaattgtacttcagcaactcattgctttttagataccactgaattatttgcactaatggaggaacattgttataccaacctatttatatttgatccacattttaagattcctgttcagcttatttactttcttacttatgtcttatctggattcttattaacgttagttctcccttacttgcttggaggagaaatcattagaaacatgctgagaactgggagatggccacttcaagtttaaatttgctatgaagaagctaccaataaccttctttcagtctaaattaaggtggcctgtagttttacaacccaaagcatgattgtgggatgctaatttagggaactattctgcagaaaccatgacacaatcagcttgctggtccgtatttagaaccatacttggaaattgtgctcaggtctgcaatttgtaattcatgggtaggggttgaatctagaggtggctgagagttcagccacaaaggtgataaaaggattgggaaagaactatgaaggaatttaaagaaactgggattagcttggaaagagaggaagataaagagcaatttaatcgcaatctttatgtacatagagaagcttagcggaacacagtgaccagtgttttctgcctcacctgaggacaacacaagaggcttaaactgcaatatgagggatttgggataggcataaggaagtatctactaacaagcaaaattggagtagactactgagaaatatggtagaatttccatctctgaggactgaaaatgtatatattctattcctttcgagtgttttaaggtaaatcttgctcaaagatgttgacctgaacttgatggcttcctggaaatccattcattgtgtgacattactgtttttagaagcttcttcatagatggcagggaggagcaagtacaccaatcaagtcacgggcagtgtgatatggagaaaagggctccaggctgagaggcaagggaacttgattgctgtctctgatgtactgcaattagttgagtgttcttatacttgtcacttaactcctctgtgcttcggttttctaatctataaaatgagggagccaacctaaatggctcaaaaaggagtttaaaagtaagaaagcataatattcagtaaacataagctaaaaccctctcccgggccagccacggagcaagacttcttcacgtattatcttctagagcatctcatctgatatagtttgattgtgtccccacccaaatctcaccttgaattgtagctcccataattcccacgtgttgtgagagggacccggtgggaggtaattgaatcatggtggtgggtctttcctgtgctgttttcatgatagtaaataagtctcacaagatctgatggttttataaaggggagttcccctacataagctctcttgcctggtgccgtgtaagacgtaactttgctcctccttgccttctgccatgattgtgcagcttccccagccatgtggaactgcaggtccattaaaccctcgggtatgtctttattagcgcatgagaacatactaatacatcctccaacccattttacaggtgagcaaactgagggccagagagactaagtgacttgccagttttacatagctagtttcagttctgggtagaacccaaatctcctgactcctaggccaggactcatttattttactgagctaggtctttgataatcatgctttgatacagtctttgagaatccattctagtttttctttacttcgtttctttttttcttccagaaatgtttattatgccctactaaatgataggcactatgttaggtacagaatggaactctgatggactcttccaggattttaaattcaaaactcaagtgtttcagttagtgaaggaggcttctggatctttccaggcatgtagatgtctttaaagatgcaatcaggcctcctcgtcacaagtgtgtggccagagatggagaaacaaaagattgacataagtatcctccaaggtttggagtcacttctggctttgcctaagaaggcagtagggcactcttgcctttcttcaaatagtctcttccctttctctccctccaggccccagatatggatgcttagcatgacttaggcgaaacttttccaactcccacaactgcacccctgttctctccttggggtccaaggccagttattcagtttgaagactgcctgggtttaaatcctactttcccacataccaactgttgaccttagattagttacttaatgcattctgtgaaatggcagtaatactgatatccacctcagagggttgttataagaattaaataaaacaattccagtagagctgtgattcttactaaaaaagtaataagtgttagcactcaataagttttagcaatttatattaatatttccaatgtagcgataatactgtcctcctcagcaatggtcccttcagcccagttttgagaccaaacccctcccaggtctttttaaattgtgcttttttcttcagggtccgtcaactggggtatatttctgtttggagacagtgtacagacacttacatattcagattctatagtctgaccatcctaagttcaaatccctgctctaatgtataattggaggaaaccttcctgtaagtatgatgggcatgcctacataacggctttgaaatacatgtgctggccattcatgaatttaattttgttcctttagaaccatttaacagagcatattattatgccattaattattattagtagtaataataatgatagtcattatgtattaagggcctactctgtgttagcactgtgctaaatgttttgcatacattatatctaacttttacaataaccctctaaagtaagttgtttcatcccccttttatacctgaaaaaattgagactaaggaaggtaaataaattgtccaagattacaagctagtaagagacagagccagaatttagtctgaaaatcaggtttctgtagctccaaagcccaaagcccatgatcactataactccttccttaccatctgagatggtaaggacaaggcatcttacctctaggttgggagctaaagatcataatggtttcggccttactagtatgattagcttagtgaaaatatgattcacttagtgaaaatatttatcagcttaatgaaattttattagcttaatgaaactttcattagcttaatgaaaagattttctcttgctggcaaaataattcatgtactgcttaatcaatgttgaatcattattcttactagatttatacaacctatttcattgtctcgcctttaacacagtgtgaaaatttgctgaaaaactgagagatgtcatttttagaaaccaacatctttgatttttttttaaaagaacttagttctattcatcattttgggtccatacctaaaacagctcttgatgtgtaagacatgctttataaatttgtgttgaatgacatgaatgaatgagaattcagtctggttaaaaacagctttattttaaagcacttgatacagtgaaatgagctgtggacacacgtcaaataatctattctctagatttagcctggcattgacccgctgtgtgacttacgtcaagccactatttcttgactggccctcacatgcaatttatcctttgcaaaatgatgggatttaatctaaatgattgctaaggttccttccaggtctcagcttttgcagcttcctatagactgtgaacatgggaatacagtctgattttctcagtgactcatctgggaccctagaaactggcagattgggaaagaaaactaatattctctaaaactgaatttcttaacttacagattataaaactctactttttaccatgtctaaaaattcagtattcgtggaacagctgatattatcttttgctgatgggcaaaattaacaggcacctttgagacctagcttcatatctatgaaaattcattaagttgaaagttcatttgtaaacaagcttctctagacagctgagaagtgattgttctatcttgcattgtatatattttaatcttttgtattgacctgtagtcatctcactggtcaagctaacatgtttttgatagccaagagttggaaaacctggtcactattggcctaattgtactcttggaccacccatggaactcttggcaattagattttcttataaaactctttcctagagggccctttgtggataagatgagcctcacattgcattttagaatagtacgtgctaagaagcagtgcaagtaaaagtgtgacattatagaagatgcctctggcttactcatcttcattatgacaggaatttgccattgtcaatgtcttatatgttgtagaatgagaaagaaatgactctttggagtagatatctgcaataaaatctggattgatctacttacagtcagtttcagagtaggcagtctccagggcactgggagtaactagactctggtctccaggcctaggttcagctacattccctacaaggcctttggcgtgtacctgttcagttggtcagtcaccctgtttccaaacaaaggacatggccctgaaaactatacacaacagggcaagatcctggctctagtttgggattcgtcatgtctttttagttaggcaagccttcaatttaggggacaggatcagagctgtgtcatagatctcttatatctttgtgccctatcttgccctcaagactgcctcatctctttgattagttcctgatgctgtcatgggctaggccaccttcctcatttcctactaaaattttcactttaactaggttgaagcaactcatatcatttctagcatgtcactgaattctatccctgctcttcagaatcagttacactttttcaactaggtatccagcactgagaaggcacagaggagaccaggcctgtagccagttgagaggttacaaaaagcatcaaattgtaggacagtcttatacaggtgactttctcattcagtgtaatgtggattatataagttgaggctttttgattgcaagcaatataaattactttggctaactgaaaggaaaaaagagtaatttttgaaggtatagagagtgtgtcatagaattgaaggaaaagtagaacagattttcagagtaggacatctgtgggagtagaggaaacagaaactaatggtcacgtcaaggcaccaccactggaatgagttcactccagacattttctgttaaacatctttattgtttgactagtcattcagattcccagcagagaatctgactggctttgattataagcctacctcttagccagggaaggccctgtaccttagatgacagtcctaccagcactgcccataataaaggtcaggggtggttacccaaagccaagcacttttggtgttcctaccaaaaaaaggacattcaaaggcaacagatgtctactacaaaatctgttctatgggatctacagtgagggaatagattcagccttacagctaaagaaacggattgctatgcagagatttctgcttcttaggagttgccaaaaagacccttatccggcttaggagttcttggctgtgattttagtgttcttttgtttcccaagtatttttaaaatgtaaatcagtaactagcaagaggcatctttggtcattgtagttgcttggagtagaataaatttaaaaaattctttgatgtgagaaaaattactatcatcattatcacacatggaaggtcaacattagggccagtcattggagttaaactgtcagaagaacatcccagttactttctcacttttgagttgtgtagactgacaggatttgagtctttgagggctttgactagggtaactgacctcaaaacaaatagctagagggatatttctacttctatccgctgagggatttgtagcaagaagccatattgtggatggtatattttaataacaaaggggattttaaaaggaggatgacacattgatttggaatgttttctcaactgtatttacttattcttaaatattttccttcatgctttctttctcaagtggatgaccagctggttgccacctttttcttctctctttgcctctgttcctaatttctttcttatccttaaccactccactttccttcctccaatcttgttttctctctaaatctttcctccaaccttattgaatctctccccttctttttgttatctggtcatttgatctataatttcgattccttttcctgaaattccctcctttttccttttcccctaaaccatcattctagtcctccccacacccaagcttcttatctctttgctgttaatctccaatgtgtttattgacttgtgtgccaaaaggcaaaatccccagccccctcccaaccatgccagtgcattgaaaagcagcagctgtcattgctcaacaagttccttgtgatctacaaatcaatggataagaattctcacagtgaaggtttacatgtatatatttgtatgtatatatgagacatgtgaccatgtttaatgaatggagaaggacttggatcttttctagtagagaagagaagcagaaagctttgcctaaccctatttctttactaaggtaatgaaaaaattatacagggaaaataaatgatgttaatgagagaaacagggacaggagaccaataaacaatcatcaggcatgagaatatcttgctgaacttattattgatagtagacacaggaatgtaatataaatgcagtgatggaacagaaagcagactcaggaaagaaagagatgataataaatagtaataaaatccaagtgattcatatgctcaagtgaaagaaagaagaaagagggcagtgtacacaaagtaaaagggcaagaaaatggaagtagagtcatcactcgtagagataaatagttgggaaatatgagaagccttcctgacatcagtaaaatattacatgttaaacagcaaacaaaagacaacaacagtgtctgtagtacttttggaatataaaagttagataatactagagtagtatcttcaaaataagcaacttcagaaatcaagtccccagtaaagggaattggaagaatttgaatagatgaaataaggagcagtggcaagtgatacaaaccttaagcaggaaaagtgattttaaatggtactggcaggttaacaactggcaaaaagaaaaaaaaagaaaagaaaagcaagatggtgctatatcccccaggtgctgggaaaccaacctggcctaaaaaaggagcagacccacctaactttttgccaagcactgtgctaggtgcattgcatacacttttaatttaagcctcgctgtacataaaagtgaagccaaggtctgagaatgatatccattgggaggaaaaaacaggaaaattttctgagccagttccaaagtcataaggctcagggggaataactttgactttgtcaagtcagagtgaacagccagagtcagcagacataggatattgtcagaggtaaatcaccagcttggtctggtctgtcttattgcaaggtcagaggaccatagcaagccagccaaatgttttcaaccatggaaatcccctaactttccaactgctgcagtcccacagctctgagcttttactcacaggatggctcccttccagctttcaaatctctccaagttgattaatcattttcttgttctgactcattcaggcctctagaaaaatagctgtaggtactggaagggctatgtagatcaaggaggtcagataaattggcttgatgttggtctatagaaaaatctagaagatattgccaaaagcttttaagcataccgtcttcagatgctgggatgtgggctatatccacaggccattggctcattcatgtgtttgaagcagaatatttttgtgtgcattaggagacttgggtatgttcatttcttaatgtaatgttagatattgtaagctggttgtttagacagtagaatttcattgtgaccacttatttttatatctatttagatggagtacaggccagattataaccccctaacaagaacagcaacagtaaacacacagatagtgcttattattagttaagcatggtactaatattttccctaagaggccacattcacaggactgaaatgtcagttctggttgtctgagccaagggcatatatgctgattacattattttgtctggctaatacactttatcatgaagcttattttagaagaaatgttcatttttagatttctgtttgtatatttaggtcatactataaggtccattctcttgcttttataataatttagtcttctgctttattcattcaattcatgaacattcattaagtacctgagtatgctagtcattggagatgcagttgtaactaaggcatcaccccagacctgaagttttatgttgtgttttgtgcttagtgattggcataagtaaaatacttgaggaaacacagaagcagcagcaaatatttctgcaaaggagaagagaaaatatttgagttgaagcttcaagaatatatcaacattttccagtttgacaagggtgggaggagccccatcaatacagggaacagcatgtggaaatgcaaagaggtgtgaaagagcatagtatattcagggtgaaaaaatacattttttatgaattgtagtagaaaatgagccgaaataggttaagttgaggtaagattgtgatgggtcttacagcatactaaggcattatcctgtaagtaatagaagggcttatggaggttttaaagaaagagagtaacttcatttgatttcttttttcaggaagagaattctgatgatagtgtagggtggaaaaaaggggtaacaaaggaaccagtgggaaagctgctgtatagtctggaagtggtagcagtaagaggagaggtgaagggacagatttgagatgcatatcagaagtcaaatgagcagactactgtgactggttggatacaggggtgggtgtttgagtgggacctccagttaggaactcagatgtctggatgggtcatgctgccttcaacaagaaattcagaggaaaagcagccttggggaatgatgaggtcattttgtaacatgttgagtttaaattaaggcactaatgagaagagacattcaggtggagaagtccaatggacgacaatagtatgggtcaagaaagaaagctgagaagtatctgaattacaattatgcatcacttaatgataggaatgtgttctgagaaatgagttattaggtgatttcaacattatgcaaacatcatcgagtgcacttacaaaaacctagatggtatagcctgctatacaccttggctggatggtacagcctgttattcctgggcagcaaacctgtagagcatgttattgtactgaatactataggcaattggaacacaatggcaagtgtttgtgtatctaaacatagaaattaaacagtaaatatatggtataagagatcaaaaatggtatatctatgagggtacttaccatgaatggagcttgcaggactgaaagctgttctgggtgagtcagtgagtgcacggtaagtaaatgtaaaggcttaggatattactgtacactactgtagattttataaacactacacttaggctacactaaatttattttacaaattttcaacaataaattaagtgtaattactgtaactgtttgactttataaacttttaattatttttaactttttgactcttttgtagtaaaacttaaatcaagcacaagagaaaatgatatacaatcaagaggtaaacaggagatatatgaggctgctgctgctgttacatataatattgttttacagtaaaatatttttaatatgtagaaagagtacactgtaaaataatgataaaagtatagcagagtaaaaacaaaccactaacatagtcatttattatcattatcaagtattatgtgccgtacattattgtatgtgctgtgcttttatatgactaacaatacagtaggtttgtttacaccagcatcaccacaaccacgtgagtaatatcttgcactatatcattaggacagctacagtgtcactacatgataggaatttttcagctccattatattgttgaccacgtagcacataactgtacttgaagccaagacagccaattagatcaagcagaagaggagggggccaaggacagtagtgtattctgttttgctttttttcctcttaagagctgagatcttcggccgggcgcggtggctcacgcctgtaatcccagcactttgggaggccgaggcgggcggatcacgaggtcaggagatcgagaccatcccggctaaaacggtgaaaccccgtctctactaaaaatacaaaaaattagccgggcgtagtggcgggcgcctgtagtcccagctacttgggaggctgaggcaggagaatggcgtgaacccgggaggcggagcttgcagtgagccgagatcccgccactgcactccagcctgggcgacagagcgagactccgtctcaaaaaaaaaaaaaaaaaaaaaaaaaaaaagagctgagatcttacctgcgtgcatgtgttcattgtagcactattcacaatagcaaagataaggaatcaacctaaatgctcatcagtggtagactgggtaaagaaaatgtggtatatatacactgtagaatactacacaaccataaaaaaagaatgagatcatgtcctttgcagcaacatggatggagctggaagccattatcctaagtgaactaacacatgaacagaaaaccaagccatgtgttcttacttataagtgagagctaaacattgagctaaacatatagacacaaagaagggaataacagacaccagggcctacttgagggtggagggaggcaggagggtgatgatagaaaaacttcctatcagatactatgcttattacctgggtggcaaaataatctgtgcactaaactcccatgacaggccatttacctatataacaaactggtatatgtgcccctgaacctaaaataaaagtttaaaaattaattaattaaacaaataagagaagaggtcttgccatgttgcccaggctggagtgtagtggccatttgcaggtgcatttccgctactgatcagcataggagtttgatgtgctctgtttccaaactgggcaagttcaaccctccttaggcaacctggttgtcccctgctactgtaacgtcaccatattgatgtcaaatttagtgaggatacctgatcagcattgtgtcctatagcccagaactcctgggctcaagcaatcctcctgcctcagcctctctgggagctgggactataggtgccaccaccatgcctggtgagattgtgtatcaaggaatttattcatgctatatagagagttttaggagttcaccaacagggttttacaaccatgtttgttgtttttatggcagaacacactttggattctgttcttcttctacatatgactaacagactttttaatgaggtctgatgcctcaatcaaaggctagtaaaacactgaccccttctaggccattatctttgtgtctatttggggaggagttggggagttgttctctgaaacgcaaacatgtactcctgctcagctttccctggctgacctggattccaaatgactgttggctcctctatatagatttgcagacatccacacaaaggagtgtcatttgtatgcagccccttaactaattgtaacagtctgttccttaagtctctgagaaagcacacaaattgattccccagcacttgcctatttttgaggacacctgtatgacccttcatcaaaccagctgacacattctgcctgcctttattcacctgctatttcaattatgtgagcagtgatgtatctgtctcaaaaatctctgtcctgggaaatttcttcagaagagaattattggaaaaaaatttttttgctgtggagccaactcagggctttaaatcttttccagcctacagagcacctggattcaagtgtctattccctcctgactctggaagaatgagttacatcttgaattgaggatcataagcacattgagaaactatgagtttatttcttcctgctgttaactgaagcaatgaaaaataaacaaatctagatagcccagagccagttttaagtatcacaagatggggcctagcaatgtactagaacttaggagccttagtttcaaaatatttttaaaaactttattgaaacatagttcacataccatcaaatttacctatttaaaatgtccaattgagtaatttttgtgtattccctgagttgtgtaactattgtcattatcaagtttgagaacatttttactcccaaaagaaatcttgtacccattagcagtcactctgcatttcttctccttactccccatcccagccctaggcaaacactgctttctgtctctatggatttgagatttttttctgctttttagctattataaataatgctgctgtgaacatttacatgcagtgttttacatggacatgtgttttcatttctcttttttttttttttttttttttgagacggagtcttgctctgtcaccaggctggagtgcagtggtgcaatctcagctcactgcaacctctgcctcccggttcaagtgattcccctgcctcagcctcccaagtagctgggattacaggcatgcaccaccacgcccagctgatcttttgtattttagtagagatggtgtttcaccgtgttggccaagatggtctcgatctcctgactttgtgagccacccacctcggcctcccaaagtgcctcagcctccgaagcatttatcatatgaatatatctccgagtagaattgctgggttatatgttaactctgttttcttttaacattttgaggagctgccaaatcattttccaaagtgaccacaccattttacattcccaccatcaatatattgagggttctagtttctccacatccttgccaacactttttattgtcagtcttatagccatcctagtagttgtgaagtggtatttcatggtgattttgatcagaaacatttttcacaaaatagaattccttagtttagtttagttttgttttgttgtttttttgttttttaagatgaggtcttgctctgtcgccccagctggagtacagtggcacaatcatagctcactgcagccttgaacttctgggctcaagcagttctctcacctcagcctcccaagtagctagtactacaggtatgtaccactgtgcccagctaaattttaaaaaattttttgtagagacaaagatctcactgtgttgcccaggctgatctcaaattcctgccctcaagcaatcccccttccttggcctcccaaaatgctaggattacaggcatgagccactgtgcccaaccatatttattgctttttacaagaaaaagttattgataggttatgctaacccttactcatcactgtaacactcagcttggtctcaactcttaaaaccagaccatataatgtaatacaatgtatccctgcgttgtggtctgtggaacacctgcaattaattctatcagtttggggttgatgtgatactggttaacaattcagattcctgcattccaccagggatcagaatatctgaggttggagtgtgaccttgggcaagatgtgttgctcttcttagcctgtttctggatctatatcagagaactggtcatgatgatatctctgtccttttcagctgtgatgttctgtagcattctgtgaaccactatcaggagacactagttctacagaaatcttgggaccttaacaacaacaacaaaatgacaaatatttatcaaatagtcacagcatataatgcgctatactggttaccaagttcacatagataactaagctgtggcccttgtccttgtagaaatacagcctcctggggcccagataagacaactgttatctgaggaaaacgcctccactccctcctcacttccctcctgggcacctggggggatgtggttagacacctgtccttcctatggcatttctcctgcttattcgccccttctctgactccctttctcaaggtgtcaccaataccagcacagccactcttgatggtattgagtttaccaaacactgagaaatcctaagtgtgtcaagtcagcccaagaacacttacaaccctgctttctgcctgacatggaggtcacaactgctttctcatcacacgctgatcctccagagacggaagcagtcatcctgctccagcctcagcctctacttcccaaaaagctgtccttctccacagtcttttttttttttcttttttaaactgggcaccaggactccattctagtgcctgactttgatatgttttcttcaactcactgctctcttcttttgttcactgttctctgtcttcttccactcacctatctcatcagcccagccctgtggtactgccccagttctgagaccctggagttccctttataatctccaccagccaaaagaaccatatgaggcctctttacctagcagactcttgatataactatcagatattccaacaatctcatttcagatactttccattgtccctttaagtatacattgctgacaagagccctggtttttagttgagaaaatcaggccagtataactgtaatttaatatctaaattaaaaagtgaaaggtcttaggttggatgtgaaaaagctacattagtcacattgttttgggccacaactgttccttatttttacacagtctgtccatccagaaggccactgtctgtccatgagaacatccacgaaggcatcagagctgagagaccttctcactaaatgtgacactgacactgtccaggagccgcagcctcactctatcagcagctgaggtttttatagggtgcccctattaccctgggtgttgtatctaccattataaagactgccttggatctctagttttttttcatctcagaacagacctcattgtgtctatttggagccccagcccatgcctgttgtgtgtgtaataagtgcgatgacttagaacagcgcctttcactccaggagctggaaacctttaacaacctcaactccacttccttatacagccacttagggaaggacagacaataaacaggaacttctggggattgtctgttcaggaaaagcggagagaaaaagaagacatattttttacttacctaagatttcattagaggtgccttactaatcaattgccaggcagttaaaagtgataaaggatgattctttatctaacgaaagaaaagccaactgaagtttcagctggctcaggaacttgcttttcatggtgaattgctagtagagtaagataaagcgtccagagtacaaaatgcctcttgttttcatgtggcctgacatttgttcatatccctgcccttgtttacttctcaaagaaacaggttctattcccgtagtcgtcccaactcactcataggtaatgccagactcaaggacattagcccaaggaaatttgccttgatgtttttcttcctgaagaaatattggactgttttctatttcttcaagttatgctatcaaagaaagaaaaattatcttacgcttttgttgggtaagtagggaagaagctgagaaggaaaaggaaaggaactagcatatgctttgcctcatgtactaggctaggcactttacctacattatcttattaagctaaaataaaaccaaattcatgtgacaagtctgcaaagcaaagcaattctagtgagcttaccatctgtgcttgtttatcgtttgttagccagtagctgtttggatgttatcatagctttcaccccagatatctacctgggcctagtctatgactttttcttgtctttccctttaaaatgtggctctgggaggcggagaaacccaacgtgtgtattctttcctattggaagctgctatacgtggttggaacctagaatctaaaaacttcttctctttccttttttctcttctttcttcctttgttatgagaaaaacctgttctctttttaaattgtcaatcaggcgggcgtggtggctcacgcctgtaatcccagcacttcgggaggcctaagcaggtggatcacgaggtcaggagattgagaccatcctggctaacatggtggaacaccatctctactaaaaatacaaaaaattagctgggtatggtggcgggcgcctgtggtcccagctactcgggaggctgaggcaggagagtggcatgaacccaggaggccgagcttgcagtgagctgagatcgcgccactgcactccagctgggcgacagagtgagactccgtctcaaaatataaaaaaataaaaaaaaattgtcaatcatggtgtcatgataaaatatttcgcttcatcattttggctaagtctaattaacataggttccatttaaatttaaaattttttagttctcaggttttattttttttttaaatagttaaaaagtagtttctgcccatctccctgccctctccctgcaagcagtccagctcatgtatgttttgtctaccattcccaagaccatcaaatgattcccctgcccagtcatgtctcccttcatgaattctggtgccacactgagtttctgtcctactcctatctcttttgagctgtgcaaccttgggcctacactcagtttccccatctgaggatacttattgggttgttatgaggattaaatgattctggcagtgtctgccgggtctccagacttcccctgcttatgttgaccctgtatacagctgccagatcagtttgtctcagcctggctatacctcagctctgaagcttctctggtttctgccacctgtgccttgctatctgagccccttccaggctactccacactaccctttccagatctgtctctcactaatcttcggcataaacccttgtcctccagccagcctggactagtaggatttctgtaaagatgcatttgttttcttcactttagacttggctcagtccatcctgtttgcccagaatgaattcttttctcatcacacttcaaggtacgctccgtagctgtcctacccagggagtggttggaggtgactgccaacctctgaacccctagatagtctatacgtggaccgcacttatcacagattgcctggaaatagaagctactaacacatcttgtttccctgtgcaggttgtagaccccctgaaggtagaaagtctagtttttcttacatatcagtgcataataaaaatttgttgaaaaaataaagctccttttttcaccttttcatctcctcattttgaattcagtagtttcctctaacgttcaaacagaggaaggtagggtacatagcaatcaggactttgccttacttcatcatcatatacttttcaagtacctgctaagtgtttaaaactgtgctaattgctggggttaagaataatattatagccacaatttactgagcccttcctaggtgctaaacgccatgctaaataagtacttttcacacattatctcttttaatatttgtgacaaccacatgaggaagatattattattatcagtatattattatgtaagctctaggtcagagaagttagtagcttactcaagatcacccacctagttagtggtagagcctcttaattatgggatatgatctactcctggacatgatcttgggcatggaggccctagaaagcttaagctcaccctaaaggagctgatgctagaggctgtctgctgatcatactccccataggaggacagcaagtgcttccttgaaggaggctcttggcaccacattttaatgtatactatactactaataataccataagtagtgtgtgcatcatatattatttattactgttattaagatgtgctctccggaattaatttacatctaaaacctgggactatttaaaacagaaattttaaaggaaatcgatacccgttgccttcagattgctcattgctttgattcacatatgataattaatgatatttctctttttttctagctagggaaatattttcaagattattaaattttttaaacttgcgaaggttaaaaaataaagcattattcatatttttccctattgtaaacttttttatattatgcacacttttaggcagaaacaactttctgcatgttaatatttctaatagtttatctttttggttaagtcatccagcttctaagaattattgagtaacatcgctattaaattgtcatggttgatgttattttatattttccgagacctagaccttgctgatttttttgatccaggcttttccttccttagggaatttagtttccctttgttcacttatttatagctctgctgtgggtatggtttggagccttggtttttattgctttaattgcttggtagtaattgacacactgtacacattccaggccccatgttccctttacatatgaattcacactacttgatgactcaaataggctataatgaatcccctttatcctgggatatctttgagattctgggttaccgtgttgatctgtttcctttaaacatggttctggcagtgttgccctactggaaacaactgacctttcatttctgctggtatttcatcattatgggtgcatcccaatctaattatatgttgatttgtaatgaacagaggcttcctctcatttaattttctgttgactttatattccctctgtttggaaacctccaagattatggtatcagtttcaattttgttaaactgatgtcttttcgtgatgacctgcttccagtgtattacttttttattcagtgattctatcaaccagtgttatctgttaaaaaaacaaacaaaaacaaccactgatatgctggtgggctctatgctgtcatctaaaatgttatagaaagatctgtttgtattgttattgttgctgtgaattagtccaatggcctacctactatataagatatatttgaccttaggagtgaaaaaaaaaatcttaacgggaatcctcactgaagtctgatttgggtacaataagaattcatcaaaaacatagaagctgcatttcctaggaaatcgaggctttttcctgtatttgggagtggtaaagaatacgcccaagaacttggaacagataaagcattggcagacaaacaaaagatctgtagggcaggacttcctttttattctcctgagctctctttcccattgtttcagagaagatggagcaaacacccagacagaagctgcttcagtattgtcttctattgataggctgcttgtgttcagtgattcctctggcccatagtgtctgctggacagttggaggctttttgaagccattgtattgttagagaataattagagtgaatgaaacagtgggtaggggttaacaacaattctttgttgcaagcaattggtagtcttggcatcagtattggtaacaaggccaatctactggaaggaatcgaaacaaaagatggaaaagttgtggttggtttgtctgatccatccagcaaatccacccatgcatggccattgtgtcctgtgagctctctggaaatgcctttggtcacactgcattccaagccacggggtgggtaatctctgggtagtcttgtacatggatttcctagactttcccataacaaaaatggcaaggcacaggtgttgtcttggcaattaatcatacactttataaagaaaacaatgtcctaacatttgggtagatgaatggcatggtagaaaagccccatgatgtttcttttggaaggagggttaaagaatgccgtaacactaactagctcagatgtgtctattgataccaaggtgaaaacatctaggcaaaaccataatctatgtcctcattgtctcctccatctcctccagacctaccctgtcctcgtcctaggagtttatattgtgatctagaggaggcccagccagggtggggtctaacaaattggggtgggtataaatttagtacttcaaagatagtggctcttattggaaaactttataagctgaatgcctatttccccctcactaatttggggaactgcagctgctgctaaattctgagtcaaatagacttgcaactatggttgatcagatttgtgatgtattagtaacacatggaagtggtgccttatgtcggggccctgggttcctactggaaacccatcacttagatttgtatgatattggtatgatctgctagtgtgtgatgctttgttacatcctcttttcaagtcagctttccaccagagcttcccaagaacagagaggcctgcctcaaatatttggttcaaattatgcaacataagttaccttatatctcttttcctgttgcttatctaaaaggacagagactcagaggcagtttaaaagtggaggtgggcatatctccaaggcgatttatgactttagacgcatatccctaaaaggcgaattcctgctctcacaagttgaatagggctctaatcccacaatctgatttaggccaagaatgacttacatttgaaatcccaaaccaagactgttcaagattggtattaaagtcggagcaatgaggtggaggtagggttcacctccacattattctgagaatgggcctgaccctcatggatctgtgggtgtgaggagtggtggttgtcaggagccggggaaggtagtgcggggagtgaaggaggggagacagcagtgtgcttattttcagtttgtcagctgctctggaaaatggccaaaatgaatgagatacaacaagccttcagggctgctgtaagccaaggagagacaaggcccctccttttaaaaagctctgtggaatttagacttaaagttttatatgttattttgtttagggtaaatgtgaaatccctaaacactccccaggaaatgttagctcccaggaacacacagtgggccctaactccctggacagaagtacgtcttgagggagaaaaaagaattcagcaccattccatgaagcctcctggctctgtttggccatgggagaaagattgatgagaaccatgattagatctgtctctgtggcctccagcagattattggaaagccttgaaaaaaaaaaatctttttgacaaaaaaggatagaagttccagtagacaggggaaagaaaagggctaaatcttccaggccaaaatatgccagggtttgtacaaaccagggagatggagcaaagctgagcacttttatgagaagaggcactggcatcaatctaaaggagagagaatctgggacatttaagaaaagggggcttccatgtgggaagaagggcttgtgaacccagtgtggttgtgaattctgtaacggaagtcaccagctgggctttttctaggcaggagttatcttctttactggcaatcatgttccaagtttaatctctcctcagtgtgactttggtctcacgttcacatcatgaaaactccaggctgttttttgctatactcctgagtaatgttgacatttctaaggagagaggaaatctggataaatagagttcttttcttggcattgttaaaaatattactaaaaagagcaaagggtgttttcagagctaagtggaagtaaagtctttctttgcaattttgaaaggccaggtaggtggctgggtacgcactttcttgtagcctgtttgttttagcccgcagtggtttctgagcagctctaagttctgataaaggacacaaacacacccatgctacagtggccatctcacttaatgctgtcttttctatcctgtgactgaagagcaggggctcttgttcatgcccagtaagaagtaaaccctgaactaaacatcacacactgagaatctcttcataatctaggcacagataatctttaacactaaactactgtgaaattctaccagcattaagtactgtatattgccctgtgcttggataggctggctaactcgtaggaagagagcactgtatggtatccttttgctttattcaccagcattttgggggaacatttcttttacattttaaataaaacttcagcttgaaaaaaaaaatgtatgtaacttgtaggacatttctgaaaattacattatagctagtctatcacggattttgaattgtctttaaattttgctatcaaaagcagaacaacaacttgtcatcatagaactggaaggcatggttattttgtttacctcttactttttgcccatttggaaactgaaattgcttaaagttacatagctagttagtgcaggaacggaaatgaaaaactatttcctgatgcctggtttatcacaatggaaggctctgcccacaagaaggaaagttcagttcagattccctgtaattttaagaactttcatgaatatactaattttagtagaaacaactaaccaagatggcttatcattctcaacggaacataattttaaggagaaacacttggaataatctaattttaaactgtaatgctaattctttattagtctatttgggggattttttatatgttgcatgacatacttgcacattttcctatttaatacttcttttaatcctgaaagcacttatttaagaatgatcactagcactccaggacaagttaaatacagaaagccatatacatataaatggcagacataactgcaaaaagagaacaatatagtgagggaaatggtcttcagggtgctgcaaagcgctttatagttacaaaatgccttcatgtacatttctaattgatcctcaggacagtgttgtaaaaggaggaagaatgtgtgtgtaagtgtacagctgttttccagaacaccaaatcgaagctcagagatattgcacaactcaccagcacagcgaggaagctactgaattgggactcacactcagaccttcaccccaagcccatagctcattttattacttcataatgcgttagttgcagaagtaataatactttaaaaagcaatccacattttttctgtttactctttcctctcttcttcaggacagaaactgtactttccttgtccagttccagtttgtattattgtattcatggtatttaccttacctggagggaataggccttttaaatatcattaaaattgggtttttgaggttatgttcttttctccttcacatcctaaacttcagacctcatgctctttggccttccattcaattcaaatgagaagggctgttgtaattgttggcaatgcctccccaggctgccactgtatgtgaaggatcttcatgtttggaaagaaaaaaaaaatgcagtttagtgaagttcatgattctacttttactcttctaacatagccttttttttttaatttatttgtttgtttttacatgtaacactaggtggcagaataactacaccacaaagcaccacatcctttgtttctcactactctggggagtgggtatctgaatagtgaggcataaaaccatctgtggctacatgagattggaccaaccaacaaggccaatattttcttgacagggaactggctgcagtgattctaaaacgtatgcttccaagatactgtctttaagatttccatctttcttttttccccagctcccctggattttaatttctctgccccattgcactctgctagcagagggcggacacagcctgcaggcagctgctttgaaatggcagattgggatggatgtgcccattggtgctggcaccctcgcctttgtgtggcagtgggtcatgaagggtctgggggtaaggcacctgagtccttgcccgaatggcaccaggccctctggcagaggggcagcagtggctgggctgagtcagttggaagatgctgccctcactaactcaggtttacagaacaggtgtttttaaagagcagtctgatcctggttcagctctgtcaccggtttggaaatactgccgtgcagtcggtgggtcattgcctctcagtttcttcctagcaatttgctggtgtctgctaccctggatgcctcacatgccacaggacacactaagctaaataaagcagagcaagttctgtctttcatgttgtgaagagtatgaacttgggctgcggaaatacttctttggatttttgctgaaaaagaaaagaatagcattaaaacaaaacaatacttaccaactagtaataatactctaagtataccctacattaagaaactcctgtaaaaccaagtctgaatgtataaaatcgatcaaacaaaaaggttgtattttaattacaaaagcgttctttgtaactggaaccacaatcggatttcattaaatagtgagcttctgatgtgaattgtaaatgttttaatctacaaaaaaaagtacttaaatcttgacttttcaggaacccacttgttatataaaacaaaaaccaactggactatagttttacacacatacttacatcacaccctcaccactttccgactgggaatcctagagtattttttagtgtttagctggaggtccaggtagtgtcctaattttgcacacacagccctggtgacatgaaagggcattgttgaaatgaccaagtgagtcatggtaatcagggcaatcctgtaggttagagatatgggggtcttgtttatttgtttgcctgctagagctgcaattctttcataaactacatgacttttgaaaatacctcaaacaacatatataaatcagaccaaggatattaatctcaggccaccgccatagtgaggctttgaagccaggggaaggtggtgagaccttcttgtttgttaaggaagaaatgtcataaaaattccaaagcaggactcaaatttccaggggagagggcctctttattgtttcctctaatagctgctttggcgctttagtgaataaatgtgttgcacaaagtaaccctagatgcatctgaactttagtctggcttggctcccacttttgtatttagcatccattctgaattatttatttaagatatttttgctgttgtttgtcactccttcttcctgtctccctaccagtccccctcattcgtcctgtctttatttttacacttctctaattaattgatatcttctgctcttagcactgcagcaaatgtgcctgcatttttatgtggatcttcactatgcaggctatgcttttaagtttctggaatagaatgatggtaaaaatgagtcatggcttgtttctatatttgtttctgagtcaagaagcttaattttcttactataatgcctgagatatcaagctatacagtttacttttaagggaaacaatcacaatttcatcaattcctttaagtagatgttttcaaatattatagaattctttggatttgtgtttccaaaatgaacaacacaatggtagtgctattattgttttaaggagaaaaagaagcatatccaaaataggtaaaatcttcccctaaatcccctgggaacaggcctatgggtgttgccctggcctgctcacagccccaggacaaccggcattaattcactgagggcctcatacctacatctcaatgactgcttaaaccagatacctgagggtctggggtctaacagaagaaaaaaggagagtagagctgagggttatggaacattcccaggaagggagagaatatcagaaaatgcaagactgccccagtgcagcagcagtgatgcagccagaggttaccagaagttctggcacctccaccttcatggacacaagctgtatatatcagtttaccatggttttcagtgtaaaaaagcaacttatgtccttcagtgtcagtttattgagctcttcagtgcagcctcataacttatattaattgggaggaaaatgcttccagagaaaggagagatgctggacaaaacaactttgtctttgactagttgtcaaggccctgctgtttggagtcattgacaagtccttgattcttgtatgacagatccaggggaaaaaaagaagtgattcatcttcttctgttgcacctttcaaggaggaattaaaaaaaaaaaagattttgcttatggacttaacatcactggcagcagtaagtgggctctgactctttgcaaggtataatttaccattgtgctcctccctcctgagtttatgcacctcgatgagccccggcccattaaaattccttcttaaaagcaggaggtgaaaagagccaagcgtgtgttttttttagaggagagtgtagctatacaaggaaagaggtcccagtcctttttctattttaaatgctggtaaacaacttgaaacctgttaaagcttttgaaggaatgtggaggagttgtccttttgactctaatgttggggaaaacaaaataaaggaaataattttaagaaaagagactttcccatgatgagctttagtctgaagcatcctgcaggtgtcacatctgttcctctaggtgtgcagattaatttcagttgcctccatgtctgctgggtccattatctttgctcggctgggtccaacatctttgctcatttctctactgaactttttccaactttcagtgctgtgcttttccatctcagcccttgtcaaagtatgaaataccatttgtttgatggtgagacagaatagtgttgtttaaagatgacatgctaatacagttatgtaaaaattctccattttgtaatgttacaggaaaaaaacaccagtgtccgttatgactgaacaaagttatcactcagccatgttatctcagtcatgcacatcaagattgacctgtctgccatttggggaagccttcataatttgtaaggtgcaggaaggaactagttttaattgagatttaagaggaatgtctttcacagccaatagcctttctttttgagtcccttatttctaaagggtcttttgcaacttgtacaaaagagcaagatccttcattcctcttttaatcctacagcctgcaggagttgagtatacctataaccaggcagctaaattttgaaacaaggtggtgaagtttaaaattacattttagctgtggaaatttgagctttagagaatgattacgttctgattgtcttggaaatattctctgtatagagactcaaatgtgggtcttccctattatttatcccaacctcttcagaaattatatgaatggaagagggagaaataagagccatctaaaattatgtaaatctagctgggatgtgtatttttgaattgacatttaaatatggtcctagcttatattctggagattcaatacactcctccaagccttactttattccctacttcttcaccacccttccgtccatcactcatacacacatgtatgtgcacacacatgtcttttgccaaacaatggagaaacatacatggtattttaatagggtcacacttatataaactgttttgcaacttgtttctttttgtataacaacattgcaggaaaaaatacactttattcttttttaacagctgcctattaagtcatactgaatatatacatacaaacccatttgttattgatggatatttaggtggcgtctaatttttcactatttcaagcaatgtttcactatttcaagcaatgttatatgttctttttttcttaaaaaaggaatgtagccaggtgtggtgactcactcctgtaatcctagcgctttgggaggccaaggcaggcagatcacctgaggtcaggagttcgagaccagcctagccaacatggcgaaaccccgactctactaaaagtacaaaaaaattagccaggcatggtggtgtgtgcctgtaatctcagctgctcaggaggctaaggcaggagaatcacttgaacctgggcggcggaggttgcagtgagccaagatcatgccattgcactctagcctgggcaacagagcaggactccgtcaaaaaaaaaaaaaaagaatgttcctcattgtaaatttggtcaaattctccattccaaaaggcagaaaaatataaagaagaaataaaaatcacttagtcataattgtctatccagagatacctttaatactgtagtatatttatttccagattttttcagtgtatttgtttattaacaaaattggtatcatgccatctgtagctttttttttcatgtaacattatacttaagatatttcctcacatccttcaacctttcttttggaaaaatttttctgtatgttgtgttttgtcttttgtgaatgtttgtttagttttctgttcttcgcgtttctattggaatgttaatgtgtgtttttgtattggcttatacagtaaggctattaaccttttgtctcatatttgtttcagttatttttcccagtttctcatttgccttttaattttgtttgtggaatcatttatatgcaaaagtcttacattttttgtataatcaaatatgtcagcatttttctttataatttcttttaagcaaaacacatttctttaaaacacataaaatggtagctaataagtgattttgaaaagtttccattattattactacagcttttaaatctgtatttatttatgctttacagtaacccccctgtggggtaggtaatgttatctccgtttcactgataggaagttgaggcacagagagtaatacagatagaagtgacataaatgagattcaaactcagggttgtggacagtactcttactcactaaatatattgctatatattttactgttataattggcctcaaatattatcctgctctgtcttaacaattactaaaaacgagaaaaatatgcatcatttattctagtttttcaaatagttttataattaactctattttgtctggatcttatcttgatgtgcagtgttaggtgaagctcatatttaatttttctatttgtcagtgtccccagtatattagtgcctctttaggaacttggaaaggacttgccttctctaagaagcctttgtgattagtgccacttcatgttacttgtttctgcaattgtttatttcttcagaattgttggtttctcagcagctttgatctgaatgattttgtggaatctcatgttgctcctagattaaaagatttattttaaaaaaagaggtgctgtctcttcaagtcgtttcattctttacataagaacagggtgggaggttcttgtcctagttagcatcagcccctctcccccaaccctccacagtcagcagatccatgaatttagatgagaggaaagccacatctccattttcactaacctttaactgaaattgattatttccttcaattttgattgtgggcaaaaaaccacagtagtattagctgttcctgggactttaaaccacagatcagatagttaatcttgcatttcagttgttccaggtacctttaaatattctttatacgcatcactactttgacaatattgtagttgatccaccactagattttgccattaatgcattaagaagcacattcattaatatttcaaatattcaaagctattttggaaactatatttctataaaattagttttctttgtaatcctatatgttttatttacttaaaagtgtatatattttatgcacttagaaacatttttctgagaagggcttataggtttcaccaaatcaccaaagggatccatgataaacactgtgaagagttcttgtctgtttgaatacaaggcataccattgggccttgtaaattacccactgggtactgagtaatcaagaggcaatttaggaggagctggaaaatagtccaatatattcctctctagtgctttgattctttcacttctggaataattctctttatagtcctaaagagaactgtgtattctctttttctccatctcctttgcctttcatcctccccttttcctctttttcacttagtattttctttctttcacatgctcccttttttttctttctttctcattctcttcttccttgactttgctctttttcccttttcttcctcttccttttcctctctccccactaaaaacattaatatcttacggagtttgtgtttcaactattttcagaaaactttttctctttgtggtctaagaaagagttcaaagacagagataaacaaaaagagttgacagaaagagttaataatatcaacaagaagttgaaagcaagatttgtcaaagataaacataaggtaattatctggaaatagttgaccttagaggtcacctgcctggtttgctggtctggcccctgggaaagcccttgtaccctggttctggttccatcattccaagtcctactttcataccttagttacctaattccttttataagacaatcattcacactaattttcaaagtcccacaaggagggacttgttttgagacaatgaggcaattagactgtattgttgagttacagtcatttctttgagattagttcgaaagtatatatattcatggacaaaagttatcacataattttctcacctaaagtggaacttttgatacctgtaataagttagtagtttctcaactgcccataccatgatctcacctatctgctgcaatgtaatagtcattgttcatggatgcctatttatacaatgtgtattgctacagagcttttccttcttaaagtaatttctatgtctgggatgatgccatttttctacactaaaaacattagctcgtcttacagctaatataagctgaaaattagaggtgcctgggggagggaaatgaggcagatggattgtttacatgagtgctatagtttcactttttatgcaccagtcaccttggaaaaattaatgccctgtaagtttgccaatcagattgctccagtcatctctaaacattccatttggtttattagaataataaatactgtgcaaaaaaagttcatctggatccaggatattatactgtggtcagtggaagaaatatgtgctgcaccttacctctgactagatttggtcaggtgacacagtgagcttgacaaagggatacagatttaccctatttgggtgttgaatctgaggactagtcactggagttacagcctttagaaatctttgtcacctgtccagggctggtgctggtggcctcttcactggccatttctgtcatgcacctgaccatttgatgtctgctgagtggtctattaagaaaggattaaaggatctctcttcatccttccaggtggattcgggtgtctgtagtcacccagaaaagacttactggaaagtccattaaaggtgtcatctaatttgatgacgatgactctgaattaatttcagttggggaagcttccatttttatgtctggcttttaggtccttccatgatatgtcccttcttgtctcatcagactcattccagtggatccccaggaacagctctactgctctcagcgaaagaggcctgaagtcacactgcttggttgatctgtcgtgacatcctaatattttctctcaaactgttttctttcgtcctgtgtaaactttgctttttctctgaggcctatcctagtgtatttccaaggccccaggttaaatcccacctccttcccgagcctttcctattgtcttactcacttcaccaatctctcttgcccctaaccttctacagttctgaaacccgatacaaaaagaaaaacttttggcacaggaagcgattgaatagaatcagataaatactaaagtcataaacataaaatctggatttattcatataagggatattaaagttaaagttaatatacataagtatatttcaagagcaaagctcatattttaacactttatttctggagtataggttccaggaaaaaggaataaaatctgtaatttttaaaaaggcaattacagaatgtcccctgcactaatcaaattaattgcagcattaaaacatggatggactttgaaaacatgctgagtgaaataaatcagacattgaaggataaatgttgtatgattccacttatatgggtatctggaataggcaaattcatagatacagaaagtagaatagaggtttccaggagcttggggaaggatgaatggggagctgttttttagtgagtacagaatttattgggaataagaaaacattttgagtagataatggtaatagttatgtaatgttatgaattaatttaatgtcactgaattatatactcataaatggttaaaattataagcattacgctacatattttaccacaattaaaaaagcaatggaacaaaaaattaaaaattaaaataaaattaattgcaccattatttgtaaagggaaaaaactccttcagtgtctaaaaatggaagaattaaactgtgacatgtgtagtatactatttatgctcaattgataatttaaaattaaatgattttgtatattaataagaatttttacataatgttaagcaattaaaaacaaaatataaaattattaaaatgtgtatatatggagcaagatgagaagggaacatgaaggagtgaaaagagtttttgctaagattgcgggattgagaaattctttaattgaaagatttctctcttaacagtattataaaactccaaagtttattatataaatatgttaggtttcatagtgttgttctctgtgattgtttttgacatcttaactcaattgtaaacttcatagaagtggagtccatgtcatttatttcttccataacccatgcttttaaaatggtagagaaccacaatagattattaatgtttttaattaatggatagatttattagttatggagaaagtaagtcaaactagagcataggaactgacattttttgaacgcttactaagtgccacacattatgctggatgtttagtatagtttttttaatttgaatattcataaaaccctgagagaaatgtattactaatcaccttctaatgatgaggtatctgagattcagaaacataagtgagctgtgtgagtgatatgattagtcaaatttgagaccaggtgagtaatcccagcactttgggaggccaaggtgggaggatgacttgaggccaggagtttgagaccagcctgggcaatatagtgagaccctgtcaccacgaacagtaaaacattagccaggcgtggtggtgttcacttatagtcccagctactcaagaggctgaggcgggaggatcgcttgagcctgcaaggttgaggttgtagtgagccatgattgcacatgccagtgcactccagcctgggagaccctgtctctatacacacacaccacacacacacacacacacacacactctctctctctcacacacacacacacaatttgaaaccaagtttttattgtttttggttgatttttcttattccagaaacatatctctttaactagtaatatgttagtgtaaccgtggaacattgcgatggtttttgtgtcttaaaaaaacttaaagatgctgggttcatgactaataaaatggggtgtgtgtgtgtgcgtatgtaaggtatcaaacaatgaacactaatgaacactgcaccttttccaacattgccactcaaggacttcccacagactgcctgttatttgggggcaggtcatgaccatccccatgagatagtttactagagagcattattcttcctctctcacacattggtattaacttagacttttgtggtcttaaggaataaacacccactcaagccagctcagatgacaagaaagttactgcaaagaaagaagaatcttctagaatatcaagagcaggagccttcctgtgtaaaaattctggagcctctactgccggtggcctaagtagtcatttttcagaccagagtgacctgtccctagtcaaggttaactagactagaattaagcaactgagtcaagggcagaaactaaggggagaatttgccagtggcaggtgggcttgaaagaagctgctcagacatatttgtgagacatgtcagtgattgaggctctgcaaattcctgctgctgaagtccagcctccagtgccagcttccacaaagctctgccctgtcatggcccctgttcttgaacgaaatgcaaagcaagggaggatgatttaaaagctctcattgttcaattcccacctgtgagtgaggacacaggaaggggaacatcacacaccggggactgttgtggggtagggggaggggggagggatagcattaggagatatacctaatgctaaatgaggagttaatgggtgcagcataccaacatggcacatgtatacatatgtaacaaacctgcacgttgtgcacatgtaccctaaaacttaaagtataataataataaaataaaaataaataaacataaaaaaataaaagctcagagcacaaatagagtactcagaagtttttgctaggttatcatgtgtaatttaacaagatggcatttatcttttttttaagagactgaagaagaattagacaaggttagctgtgtaaagccagtggtaatctgccacatgtggttataaatggccataattttgtatgatcccaaagcaagatagatagcagattaagggtcagcacagatctgcaagttgagctcatggcactttatttccctccctagccccttttctagtgcttaggtagcaggcaccagttaagcatggtgtcttgaccatgatactgtggaccaagcagcgatatggctatggctatatcactgttttgcctgagagtcatttattccttcattatatatttattgggcatctactccgggccaggcatgtgttgggcattgagaaagtggtgaaaaagacagaggtcctgtcctcaaggagctttcattccagtggaagaattcagataatacacaaaataacaaatatataagatattttcgagtggtgatatatttgaccagggaaataaaactaaggaaagtgataatgggggggtgtggagactggctgctataaaatgggtgagcagaggaggcctctatgaggaggacttgcattagctgagacctaagtcatgagaagcatccccatgggtcttgggaaaagtgaggaaaacatattcaaatagaaagaaatatctggtgcaaaggctctgggataggagtaagcttagagtatcccagaacaaaaagagggccagtgtggctgagagaccgtgtgtgtgtgtgtgtgtgtggagaggggaagacagcgggggtagagatagtaggggagtaattacctcacaagtttcatggctgacacctctataacaaaggagattaacaagagaaaagcatagcacatttatttaaccaaagttttacatgatgcaggagccttcagaaattaagatccagacccaaggaaagctgtattattatggttaggtttgatgaagcatggacagtcatgtagaagtatagttggacaaaaagcagatatgacctaatgatgataaactagggggatcttagcaaagcctgtttgtttagtttcttcttggcctctgtgtttaacattccatccctccgggtatagtcaagacacctgtctcatgagggtcttcaagagagaaggtcagagagacctttttgcttctgcagttttcttaacttccttcagcttaatactcagtgcgccaagcttccatatttgggggtagcattttctgcactctatcatgctataagctgattttctcacatttagaggaacattcaacagctaacataaacaattacctgatgtcatatttgaagatatacttagataataaggtcttaaaaaacagtaagtacattaagtacattcacaacaattgttaatcttccattagttctgaaatgcctaatctaacctttgttttatctcagacttgggctagaatgctccttttaattcattctgcatgatttcatagaatcaattttttcttaaggtctcatatccttcaaagactttagggcaattggtcacgaagacccttgcacctcctcaaggctgtgtgctgtggatgttgcagcttaaggaagcattttgaaattgggcatctttcacagcctagtgtagaagttattggcccgcagtttttaccggctttctctttcagaaatcttcttttgttcctgccacaaggcaaaaacaggaaaagagatctgtgtgaaagaatgctctcccttttccttttgtggtgattgtgtatcttaagagaaggcctcaaaggttcccggagctgtctgtcttttcatgtaaatggagcccttaagcctatttagaagtgtgcgaaaagactgtgggagttgaggtgaaagatacagaagagtagcatcagcaccccgtttaatgtattcaagttcaactgtgcactctctctttcttgtatataattaaaaatactgcagaattgtattttgcacttgtacttttaattatatgctattcatattactatatacccatatagtgtgcagcgttgcaactacaaaaccatatattttgtattgggaggtttaagggattttccagggtaattttgaccgcgtaaaatttgccttacatgccaactctagaatacaatccccacgtaagatgtaaccctctatattaggtatttttaaatccctgcttatcccaaagtgagcagaactgggactcacattcaccccttgcccccaaaccagtaacaggtatagggttgtcactgaattttgtgagaagaaaagaggtgagacagaaggaacttgtgaggtttgacagaggagcaaggaaatctgtggcaggacacagtaggccggggacgctgggtcaggcagggaagggggctgagagagagttcctgggtgagactgtttgtactagtaaatgcagggctcaaagccatactagccatggggttggtagagtttgtaaataggagtaactcctactggatggataatagccatttttccctagagtaccttcaccttacaggaaagtttactgtgcattgttccatgtgaatgttgcagcatgtgtgtgtgtgcacacacgtgtatttgtgatgttgtagacagagtaggaggaaagagtagcagtgtggaaagaggagaaggcatgaggatttagcatccaaggtttaagaacaaggtctgccttttgttgttttgtggctggggcagtatcattaaatggctgaggggacctgagatattggcatgagagagggaaggtcacccttgtagcccctgtcacctgctaccttgggaggcattcccttcccctcttctcacccaccctaccactccaaggcagagtttgtttaatcagatgcagaaaatgttctgatttggtagtaaagaaaggtaaacaacacatccccatgccccacttaaggtttttaacaggtgcagttgaaatttatattcatggatgtgggattttcacctgccccctgacccagtttgtttaggaggttaatagaattccaagtcgcatctccctgggttggaattttctctacaactcttggtagtgatggggttcaggacacactaccccacaatatgaagcctggcatttgtgaaaattgcagaagcaggaaggtcattctcttactttccccctgcccttctctcctgaagctaaggagtgtccttatctctgaagacacacggactcagagaggagtttgaacaaacaggccttgctaaattccctcttgtttattgccattaaattatatcccctttttccaatcatacttctctacgactatccatctcttcatcaaacctaagtaaaaatacttaagtttacttgtttctttggatcttgatttctgaagcctcctgtgtcatataaaatttataaataaatttgtcatgcttttctcttggtaatgtggcttttattatagaggctcagccatgaaaaaataaatcgtttcctctcccacagtagctgttcgtcttttgagcaagtcttttagcctcagtttcctcctttgcatcagagatgatactgaccaccctgatgctctgtgagggctgaaaggaacaggatacctgcaagcattttcccacaacttatgcagatgacctgtgaacaaactgctaaccagcaagagtgtttgaatacaaaaaattctaatgcttaatacaacattttactcaagactctgttacatatgacaaaaactcagttctaagaagcttatgtaaaaagcagaatttcttgttttatagaagccagggaagacctgaggagtgaaaagggaaatcaccacatataagggatgaggcaggtgagtgctcccaggacagacagtcccaatgatgttagcaacatattggaacaaaaaattaaacaaggtcttagaacttaaatctgattttataataatattcattatcaatacttaattctaattttacatttttagatttatgtaattaacattagttacctatacagtaaagataaatatgtttcataatgctttttttctgacattagttcttgtttgaacacacaaagctacacttttctataagtaaaaatgaatatgtcagactttcaattcggaaacttgagtcaaatcagcagtctctgggaagaggaaagttgtaaggcctatgttctttcataatggcctagcccttccccctcatctgacattttcttgtggaaaacatctggtttaaataagcactaatggcaaacttgatcatcagaaactagaatgcagaaatcacaaacaatgtatagtaggttaaagggatgccaaaaagcagtatgcaaagagaagtcaacagcaaatttattttatatataaatttcaccattttggtgcttgtcttctaactgccttacacttttctcttctgggaacggccaaggcccccaaaacacaaaagtgaactatgatcccactttgctagactcttgagatggctctgtaaacataccctctaatctatggtccttccttcctacttcctcagaattcactgaaaacaatagagctctaggaactcctattgcttaaaacaggggtgaggatcgtgtttattcaggactatggctgttaaattagcaggactgttttgactagctggtactcaggggtagggttgtcatgttggtcaacatgcctatcccatttgggactactctaaaggaaataggaatgcctaaaaagtttctagacttctaagaattctatgactggggttagggatgacttataggcaggaacggagccagactcctgacggtatccaaggtttataggcttggtgatagaatttaccagagtagaagagaaagttttctgagtagctagtgttttgaatggcatggggtttgtgacaagatttggggtaagccagtgagagatgctttggagttatctgggacctcatttattctggtggaatgccagaagtacaggaggcatctcctagggtatttagttttttagaggctaggaaaggtagtaaaggtaaagtagatacaaatttgttactatgacttttatggagccttgagatagttatacgaagtaggaggttgagcagggattattttaatcggagaagagattagtagaaactcatttaggaggattagagcatgctgaatgagatgtcagaagcttttaggatccaagaaaagtggatggcagagagagagaggggtcagcactgtgtttaatttccttctttaccgtttctcgtctgcctttcctggatattacctatttcaaactaaagggaaatgtgtggaggctgcatcgggtagcagaaaaacatggaatagggaactctgcctctgaaatagcatataatacttcccacagggtttaatgtgaaataagtggtataatctaggtcaagtggcttaggtagaatactgatcaagtgaccagatgtcttggaatgagtaggataatcttagattttggcttcctatcctgtatccaattcactttaccattagggcttactattaccttgatgtctggagtgaatagacccttatcaacttacgataaacatttatcagtagtttagacagaattcttaaactggattcagaactagaattataatagcagagttactgtatgtttcaaacagtgatttggccttagtaaagtttggtctcttaagatttattactcatttatggctaagtatatcacaaataaatgttaggtcccctagtgagtattcagcaatcatttccttgggatctaaggcataccaggtgctatgttcaaaatgaatgggacatggttcttgtttttaagatgctcccagaccagtggggcagactggtataaaaataactaactgtcggccaggcgcggtggctcacacctgtaatcctagcactttgggaggctgaggcaggtggaacacctgaggtcaggagttcaagaccagcctggccaatatggtaaaaccccatttctactaataaaatacaaaaattagctgggcgtggtggcatgtgcctgtaatcccagctgctcgggaggctgaggcaggagaatcacttgaacccaggaggcggaggttgcaatgagctgagatcacataccactgcactcctgcctgggcaacagagtgagactctgtcttaaaaaataaaaaataaaaataacataactaactgtataatataataatatgataaatgctattctgttggtatgaatcaagtagcacagaggaagaaaacaattcactctagtagatggttggcattttgagagagatataaatataattgtgctcatttataacatgaattataaatgtagcagcattggaaatggacatttaataaggtgtagcactactaaattggattaagtgcatgcactgggtttatagatggatgttcccatcaaatttgttctttatttgtatccctacccctgagcagtccttgcctggcaagtgattggtgtttgcactgttgggggtaggctttaggttcctgtttgggcaccaggagctgtagggttagaagaagtaatgtctttttctcacctattgcaaggttcattactgaaccctatagcaaaggcagagtaacaagcaaaaagcataacaaatttatttaacagagttttatgtgacactgaagcccttagaaatgacccaaagacccagggaaaactgtgtatttatatggatagtcatacagaagtatgattggagcaccacagagtatcatctaatggtaatcaactagggagaactttgcaagccctgtttgttcgaatggcttccaagtatagggtaggacccctctggaatgaagatcttaaggcctacttttagggaagataggtcagaaaattattttatggcctgcttcagagggaaaggcaagagaaggtcagagagtgaccttcctgtttctgtggttttccaatgtcctttagcttaaaatgcttggtatgccagggtgccatatttgggggtatcctgttctaagccccaacatttccctggaagggcgatggctttttgatctaagcaaagttatcagagggaatgaggtacaaatcaatagaggacagactatgagatcaaattctgactctactacttaagagctgagtgtcttttgacaaattacatgtattcctggtgactctgatatctctataaaatagggatgatagtagtaccaaccttacaaggctgtgcctcaaatgtgtaataaatatgaaaacactttgtaaagtgctgtaaaaatatataaacattattgttttatcacaaatatcagcacaccaattatttatgtagttctatacattacgcaaaaagttacagagatgtggggctcatcttctaggaaaacagaatcagaattctgaatcagctctaaagtcggagaccaaacctcgagctctctctaggtgctgtttctcctgaaaagttgacttgtaagtctaacccagtgcattgcctctgatggcctggtgttcttcagataggtaaaaagcaactcgaaaaggggaagagtattgtgctttccgcaaagacgatacttttttgctctttggaaattcttgctcttttggttttgagctctgaaggtgaacaatccagctgattcaaatccccagagtagccctaataataggaaaaccgtgacaaccgcagatattaaaaacatacctcaatttgcacaactggggtaagacaaatacatatggtattatatgaaaaaaattcctttatgcaaatctagaaacttactttaatgtcatttcatttaacatcaaagagatgatgtcaaagagaacatgtttaccactgggagagtcaaatgaaagaattagtcttctagaattctttcaaatgaaagaatttgtgtgtaaggtttgattggttatttggcaaacactaatattaataaaaagaccagtacttctagatatgggccactttgtagagggattatgccagaactcccatagtatgtatagagacccttgaaggagggtcctcaaacccataagggaatttattttaaaaatattttgcttatgggcccataacttcattttatgtctctctagctcacaatagaggattataatctattgggctgatatatctgagttaacatcagattaatcgtatcactttgtgtatgaatatcatataaaaatgttagtggctgctgttttcaccatgctctgtcataattaaacaatttatttcatgctgaagcttccctgtcctgattctgggattgtcagttttatggttctcattttacacagataaaaccaaacttttcagatgtcaaataatgtgctgcagacttccatgcagttctcagctgcagttataaatcactgttgttttaagtaagtgacctaaatgccatttttattaggaatagagtggctaggagagactaacataaagcctctgatggagttctaacatttctccttgagcagcaggaagagaattgcatttcctgctggctagagaagccaggtcaattttgtcctaccattctgggaactatcacttcagacacctaacatatccaggtcctgcttatttttcttgaatgagctattaaaatgcatgtatgtgtgcacatacacacatacatacacatcatgcagccatttgcctctgtgtatacatacatatcattgtgtagattgcactttttcagaaaagacaactgatcaccagcacgtcactctcacttcctcccatgtacattttgtatcttccccacagggaagtgaaactggtggtgggttggaagagattgagtttgctgaagtggattctgccaagtggctgtttgtggatgacctttgtcttatagggggtaatagtgggagttacggattcctggcaaaatgtctgttcacatctcatcacaattagaatcataaactatgggctttgtggatttgttcacctgagatagtgatgaactaggaatcaaaagatctgggttttagctctatctctaaatatctacatatatgtgaagatagctgtgtataccactgtggatattttccctcttttgtcttatcttctccatgagactttcaaatcctcaaaggcacagagcatctttaatttacacagcattcactttttcatctttgtttgttcctagactgcatttagtagagatgtaataagtacttactgactgatagaatgagaccacatcctgccttagatgaactggaattccatttgaaagtgtttccaaccagaaatattctgctttggtgccactgctactgttcagattcaactatagcagccacagtgtgatcagacaccttctcccctcaggcgccacccttggccaccctgagaagatgggcccccctgccagcatgtctttggggcccagtgtttctgtctctctgcttctcccaacactcagtggcctgaagaagaagagctttggtatataatttcttttttccccccagccaagaggaattgagcactcatgaatattttaagcgtgttacaaagaacacaaaagctgtgccttcatgggaggattaaatgttggtgtttgactcctcacaatcagcacattttaaaacataaaccagatcatgtcagtctcctgcttcagagccaccagtggtctcccacactcttgcaaccaaacccaaggctgggtgccagcctccaaggcactgcctgactcagccctgcccactgctctgaccacctcttgcagtaattccagccatgctgatctactctgggttcccagggcatcgtaagcatctttctctttaggacctttctacacatctcccctgcctgggaccctgccctgaaccctgtgctaccgcaggatcgtcactcagatctcagcctgaatgtcctgtctcagacaggactcccctgactgtcctatcagtatctacacccgatattttatttcctcacatcactcatcatatctgaaattgcctgctcatttcctggttttcttgtttactgttggaccctgactagggggtctcactctacaagggcagaaagaggttgtcttagtctggttctctgttgttacccagaagctggaacaacgcctgttccccagcggttgctcagtaaacacatgtggactcaatgagggattgaattggaagttatttacctctctcctggcttttgcttccctctcttcctttgtctctcttttgcggaatctgtaccatgaaaagggctgttgtccagtagtggaacacaggccttggattgaggtcctggttgactcacttgatctgaagcttctggtcatgcacaactgccaattggaaacagctactatagaaccaccctctttttccaaagggtcaacaaggaaatcaaaaatagaaatacatttcaggtagtcatgtaatactttactaatactaaccctaagaataactttgcgataactttgcaaccttaacttccattagtctcactaggcagttctgcttcttcaattcctttagtttgttacatgccctgcgatccagcccaaaacaggagaagccctgtagaatatatgttgctatatcctcagatatggccaataaaatttgtttgtgacctgtaaggagcagatggttcactgaaggccattcatagaggaggcaaagcaccaaaattcagtgtctagccttaatttttccttattagagagtctggaatagagggatacattttcaggatctttcctaatagaggagttctttttttatttggatgaagagattatttctgtaatttcccacagtcttaggctgaactctccaagtaatgaacttttactcagaatagtctaggctttgtgtactcatggaaagtgtaatatagcttgccttgttggtttttctggagatagcacatttgggtcacaggggttcagccagtcttcggctgttatgcagtgtaattttatgggaatagttttataatgttaacatctgtagactgagagcttgatgaagacatcacccagattgcctgggaaacgccactgactttgggagctaattcttgataggtaaaatatttagctctctctctgtctcttttttttctttgcctagatacagctaccaaccttaccatttccatcttttatggcagatgagctatgtgtgtatttttttttatctccttgcagtatgcatttttgcaagttaggggataaagcccaggcccttggctttttaacttttctgcttccttgatatttgtacatgagataagatgttaaaggatttctctttacagatttctgttgaagagttatagaattgactgaatattcatatgtgtactgtcctctgcttcattaactctatgttcatatttctttttcccatgaagcctctgtcgcccattttgtttaaaattgcaacctattcccacaccttaagctaaatctcccttaccctagtttgtttcccatagtaatgatcactttctaacatactgtatcatttgtcatttattacgtttattgtctgcctcccaccactagaatgtaaactacagggaaggatttctatctgttttattcacattgtatcccaagtgcctacagcagtgcttggtgcatagtaaggctttgataaatatttattaaatgaatgcactgacatcctagtgaaaagacagatactgtagtgtagtgatgaaaagcttgggctttggagtaaaacaagcctgggtttgaatcccagctttgctgcttaccagctgtgtgtctttagaaagtgatttaacctctctgagactcatttttctcatctataaaatgaatattatagcaccttgaaagtgtgttgtgaagataaaaaaaaaagataaataggcaatacagcatggtaggtaagaaacaaggctttatcgtccaatggatatgggttctgggctttagcttccagttatggctctcccattaccttatacaatttttagaagccctctaagctcattttctttacctgtcaaatgggtataaaatactatggcctgcctcacaggagagtggccaggattaaaggaggtaatctctgcgtagtgcttagcagactgatcaactcgtaacaagggactaattaattgaagatgacgatgatgataatgtttgaaaggtgcttagctttattgctcacacatcatagtaattgctcaataaatggtggccttgacaataaatgaaggacaactttattagaactctgggagcctcccaaatttgccattttctttttgttctcctttctccagggggaagtaaggcaaatgcatgaagttatctttgtgagatacttgtttcaactcgaaaatgaaacagcaagcaatttttgtgtgccacactttttgccctgtcaccaacagttctgttatgatttcagaacttaatttctaatttttggatgcagttgcacagaggcatttcttcaccacgtgatcactgtgggggcttaatataactcaggcatttgctcagctggtttggagctaatggaattggctgtagtggctgtacttaggggagattataatgtctcaagggtttcattggcttccacttccttctgcagacttatagtaaaagacaagagatgcctcttcctggctctatttctcatttgctgtgtgactctcagcaagacacttcgctgccgctgagaaccacacccactaagtggacgacccagttatgaatccttgctccattctgctgtatgaccctgaccaaattattcaatgttgccatatcttattttccatctttgtaaataaataaatgtatatgacaaatagaatgatcctataccttagggctttgtgaagattaaatgagatactacatgtaaagagcactttggaagtactcaataatacttattattatgttttctgtataaaaaattgaaatgttctattaccatggtattttgtttataaacactttatatatatatatatatatatatatatatattttttttttttttttttttttttttttttttttttttgagatggagtctctctctgtcacccaggctatagtgcagtggcgtgatctcggctcactgcaggctctgcccccgggttcacaccattctcctgcctcagcctccccagtagctgggactacaggtgcccaccaccttgcctggctaattttttgtatttttagtagagatggggtttcaccgtgttagccaggatggtctcgatctcttgacctggtgatccgcctgcctcggcctcccaaagtgctgggattacaggcgtgagccactgcgcctggcccaacactttctatattttaaaagttctagaacttcggcttctgcccatgatgtcctgtggggtcctgaaagcaactgttgaagaatatctttgcttgaaaagagccacgagtgaccactgtgtcttcctacaagtggtcagacacaattgtctcttgattatttagtgtaatgtaggggaataactgagattaactggtggttatgattttgcttaaggcagtgtgatgaggacactaaggttagggcagctcctgagcaggaggaggctgctatccagagtcaggaagtctcccaaggtgttttttgcctggtgatcagcttttggccaaaagcctattactctcaggtgaacctggccctgttcttggtcccaaagctcccggaccaggctgagctataaaaatagaatgccaaattattgatcctacagtgtaaaattaagctgttctatccactggataggcttgcctaagttcccctttaaggcaaattaagtgacaaatcaaattattggacagttgcttggtaagtacagaattgatgtgaggggagttaagtgattcaaatgcttatattatcaggccccgttagcctgctgttccacctctacagtgcagatctatctgtcaggtgaccacttgagtgggcacacagggcttcctggcaaccctgattaggttcggaacaagcacttccatcatttttcttttttttcttagagatgtgctctcactctgtcatacagagctggagtatagtggtgcaattatagctcactgcagcctcgaactcctgggctcaagcgatcctctcccatcagcatcctgagtagttgggattacaggtgtgagcctccatgccaggctatactttatataaaattttttagctgacagacttcctccccatatcctgttctacatattattttttatttaaattctatttttcatcagagtaaaacatgtataatgttttacaaatctagtaatagtatagatttgtactgaaaaccagtttcttgccccaatttccccactctcctttgcttcttatgcttcgggagcagccactttcaaatctcttgttgattctactagtgacccccacatttctaactgatatgcttgaattgctgtttcttaatttttctattttagacattatctcatgttttctatggacgatgaccatagggtacttacaccattctctccttccatttcactcttccccttcttttttccggtatgattatatcataatattcagttaatatttacattactgtgacaatgtaagcattcatggcagagctacaaaatgtaccatgattacatttactttcttccttcctttcttgtttgcattttaaaatttatctctggaacacacatttctctacccacatctcctatctttaaatcgataagggcatatgaaaccataatgccttgcctttactacacctaacaaaattaacaattcattaatatcatccaatacccagcccaaaatcagatttccctgattgtctcaaagatatccttttacagttgattagtttaaataaggacctaaataaggtccataaattgcatttggttgttatatccttttactttcttttattctggagtacttcccagaataaaataataaatgtcacaaataatgtcacaaataattaataattatgtcagaaataattacttccttactctccttttatttgtgacattaattatttggagaaattggatatcaaatgccctatattctagatttggctgatggcttcttcaccacgtccttttaacttgttctgctagatcttatatttcccataaactggtggttgctgctaaggtttgattagattagggtttagagggttttgttttgttttttctttttaggcaaaaacactctataggtggtgctagtacttcctattttatcatgtcacaaggcaataatgtctgactatatcacctttaatggtgattaagttgatcagtggttcgggatagtggcagcctgatcttcttcccatgaccaagatttctgtcaacttttcacctactggttttagcacccattgatgatcattgcctagatccattgtttaatgagacatatattctgtcctttcattctgcagttctgtcctgtgccagtgagtgctgattattatgcagtttaactccagaaggccatcttattttcctcatttccaagtctgtgttagagtcagggagtttctctgtgaccctcatgtgctacctgagaactgactaaatttatatgaaagtaacattcttatagttgtattgattaaaatttttatttgaacctctagttgagctttgctgttggctttgaaaacataatggaaaagtggaaagcattcttgtcagtcatgttgaaaagtaactggcagaaaaagtggacttaaaaaaaaaaagtagtggaacaaataaggggactctgctttggtttataatgcctcctttctctagggtaggaaaattttgaagtccagtggggtctctcctgcctgcgagggaattggcgagaagctatcaggatacgcatggatgacacacagtcacacagtcatttgaggactttttggttgctgttttgttttagtttttacccccttagagaagtctttcataaaaatttttcctaaaccctgttgcatgcaaattagggcttttcctttcctctgtaatggggcctgatattctttgatgtgttgtagcagaatttagcttctaaatacagtttgaaactagctctccacacacacacacacacacacacacacacacacacacacacacacacccttgaattctcagctgacatgttatttctatttttttgtccttactgcaagaacctgtcctgtaggaaccaagttcagtggtaggaggagattatgtagacatcttgcttctacttcctgtaaagttggatcatgcagacatgagatgcaggtgaacaggagaaggaagtcctctccagtgtctcccagctgggagcctgttttcatgcttttcaaagagctccttttttgagacagatgaatccctggtataaatacctgtgctgttattatagaaagagacagattggtcaccttgttaatgacttccagtattccagagttcctcctctgaaatactctgcagatccaaattatcataatataggggcctcttctgccatttagaatgaccttccacataactctcaatgtccaaattgggcccttccttcaaggcccagatcaaatgactcctcccctgagtctcccattgagaagtcataccttcccatctcctagcttcccatccatcctcttttcatggattacttgctacatttcattttagctcatttgcgtactcattttactttttttttaaacagaaaaatatcagtcttatctttgttttaaccacgatttgtatttaataagtattttcataacatttttaattttaataattaattacttgagtaattttgttttctgagatattcagcttttatttcaactatgcttccagtatctacaggggagtctgtcagtcacatgttgagccaggttttctatttcagaagaggaaggaaaagaatgtgtaggggaattagtatggaactggagtgagaagaactagattcaaaacccgtccccaccacttcagagcaactgctttagtgcaattggtatgtcagcaggggccttccctcaaaaatacacagctctgtagcaaaagtcatctgtaagacatatttaagacttagttcatcagaaagagggtagggaagaaaggactgtgtagatttatgagcagtggtggatggcacagggatggggtcttgggccctcaaagccctccgaggtagtactggctactgggaaaaggatgtcggggagcaggtcccacttttagctgcacttgaaaagatgagtgtacaaagcttatggagtactcaggacggagagaacatggtgagtgttagggaaggaagccttaaatataaactttactctttaacctccttgcaatctcactctgaacctccttagtcccaggtatgggtttctctcacttcttacttccatagtcctctcttggaagctctttggctgaattaatgaaggggaccactactcataaaccataaccagcacttacgaggagcctcacattagtaatggacgacaaccctcagagacagccataggtcctaatgctattattaatagtcaaacctgtgtagagaaaaaggagaagccaagatccagttccacgggacataacaattcacaagcagctcatccttatttcagaaagccagtaagacctagctttctcatggaggttattctttcaccgtcagtctgcctctttttctgggaggtgccctccccttcaggatcaaggaatgtaaagaccatgagatatggagtcagacttgggtttaggcccatttatatgctgtaaactttaggcaagtcactttttctctctgatacggaaagagatataatatataccttattgatgttgataaagatgttcagatgaaattttatattcatataaatgtgtatattatatatatggcccgttcattattttaaagcaatgtaaataattcttatctattaccatagtatttcaaaggctacatcttgccacaggtgagaatcagaggtatgttctgggggttttttttgtttgtttttgagacagagtctcgctttgtcatccaggctggagtgtagtggcataatcttggctcactgcaacctccgtctcccaggttcaagcaattctctcatgtgcctcagcctaccaaatagctgggactataggcgcgtgccaccatgcctggctaatttttgtatttttggtagagacagggttttgccatgttggccaggctggtcttgaactcctggactaaaatgatctgcccgtcttggcctcccaaaatgttgggattacaggcgtgagccactgcgaccagccagaggcgtgctgtgttctattggctcttttgcctaccagtgccagaaatttcctacacttcttggcatcttgcttttctctcctatgaaataggcaatactagttgccctagagaagaaatttatctagagaaaaaaatgtacaaggtagacacagctggtgagttacccttatactatttccagtactaccaatttcatttcttccagaaggatttagaatgccacatagtagttttcctggtgccatgcttgaaatggtgaatctatttgaaagaagggattttgtagtcacattgatgttgctgcttgctgcaagccaggcaagtcacttaatatctttatccttaaaagaggaataatgtcacctacctcatggtgttacgatgaggatgaaaggaggtctgtaactaaggcactgaacatggtgtttgatactcactgggtacccagtaaatgttagttttctttgtctagactatgtagtgctcttcagttttcaccctgatcaaattgcatttgttaaaaattccaagtaagacatggcactgggtactttaaataaaggggtgctaagggaaggtcagcatgcggtagagggctgaaagagccagttacatttgtttgtttgtttgttttgttttgtaataaacaacagtggcttctcatctcctttccctggtcctgagcctgctgagtcactgttccagcccttgggccacatgatctcaggctgtgtctatggaatacagcaaaacccacaagaaaccagcactaatagatggcaggtcattttgagggatttttctttgcgttcctgtgcttgctctcctggtgagataggaaacctttaataagacttttcctaaatgatgttgcatgtgaaatgcagatttttttttttctgttctcctaacaaatgaccatttcatgaggtttcttttcattttttcttctttcctgcttctcagtacattccacaaagagcttattcctctgctggttactgattgatggttctactctgtatgccctttaattttgcaataaaccaacaaggagttgagaccacaaacttaaagagaattgacttatttgactggattcactggagccaacaggcagatttagtcatttcagtgtggtgctagggagggcaggaggagtccatgagaaggaacaccgtgttgtcaataaccagacagaaaaaagcttgcttgtcctctcattccaaagcatgtgggcatctgttctcggcagtgatgcctttccaggccttgatgaaggcaggacggcttccatgagatttgctcagaactccaggattctgaattcagtgggactttaggtatgtaggattggtagtcagtgtttccagcttctgtgtcccttttttcaaagggatcatggtataccttgaaggactgcaggaacagccataaaccctcctcagttaccagtcgttaaacagcctggcctcttggctagatgacttcaaagaccaaagacaaacccctggccctatcacctctatcctagctgagtctttaacataaggccaggacctctgtcaggttatagaggtactaatatacttcatgcgctggttcccaaatatattaagaattaattattttttttcttatttagcactaccattgtacagagcaacccatccgaaaaataaatacaaatatcatttcaaataggaaaaacaagaaaatatttcttaaactaaagacctttagttttagaggtatgcatttgaaaacacagatactatcatcacgtatatttaagactggttccagacccatgctgctctctgtgcgttgaaatgaaactgagaagacaaatgcccaaatggaatttttcccacctgtgaactcctattccagatcccagtgttgtttgtggctcttccacatttaaccagctaactgcctgctcttattctgttcttatgtgacaaccaatcttctgaaactctcgtcatcacatttcagcagaagtgaaaatattagcagagtggttggtggccaagacagaaatagaacccaggagtctgtgtcctttcccttgccggacctactggagcatggttcctcctgcctgaagactcagtgtttccaactctaacaaacagaattctaacagttgactggtttcttcttgctactcaaaatttgttttatacttaaacattttgtacagttttttctttatgaatgattttgcattaaacaaatgggacttggttaatctgatatcagtgaatgccttattctgaggaaattaatccacaaatatccgtgggaccatgagttttcatattgagaacctttttatgtgatagactagagagccaggtagaccaggtctgcgtctggtgctcccatgtgccagctatttgatctcaaaaaatacctcaacttcttgaacctcagtttcctcatctttacaaccaggatgataacgtttacctcactgagttgtgaggataaaataagccaacacaactcaagcaattggtaggggtctgacacataggaaatgcttagtgaacgtgagtttcctctcttcctccttcactcctttagaatagggttagagatgtagaaacacataaaatctcatgaaatgtgcaccatagagagagaaggataacacaaatgacataaaaagtcttgtactaagttacttggtattgattctaaagtcagggtattatctagggcaaggtggctcacacctgtaaacccagcactttgggaggccaaggcaggaggatcacttgacccttggagtttgagaccagcctgggctgggaacatagggaaactccgtctctacaaaaaataaaacattggccgggtgtggtggtgcatgcctctgttcccagctcctcttgtgtctgaggtgggaggaacgcttgagctcaggagttcaaggctgcagtgagccgtgattgcactactgcagtttagtctggatggcagagcaagagcctgtctcaaaaaaaaatgaaaaaaaaaatagaagaaaaagaagtaaagtatgagtattaagaagtgagagaaaagttagggctagaatagttagcaaagatatcatggaaaaggtaggatttgaactggcccctcaaagatggaaacttacagagtaaaggaggctatttcagactggggcatttggggtgggtaaaccatgagaaatagagaaattagaacgagaatgttataagccttggttttcctattggaataattgaacgcaatagaataataagtaaaaggataatattaatatgtgttaggcactgtcttaagtgctttatatgctaactcatttatccttaaataggtaagattgctatgccaattatacagttgaagaaagtgaggcacagagacattaactaatctacctgagtaggtgtggaataaataatctacaactagtaggcagtggagctgagctggaagcccaggggatctgactccagagtccaccctcctaacccaggacagctgcttcagtcacttcccagctcccctcactctgcattgaggatcagctaagaccattctgtgaacataccctgaaaagtataaagtaccatatacgtgtaaaatgacatggttattcttattaatgatgtcatatgagaggcgacaaatagctacctgaaaatgagggagaaaaactatggtctagcacccacatgcagttgtactgggcaggtttagccagtgcacagcatatatgcctcaccttcctctctagcgactcttgagtcctgaaagcctcacgtttcccatttggacagtgttccaggaggccatttccaagccagtatcagagactaaaaacctgtttggcatctggcagtagggcttgtgcctcaagtgtgatctgcctttggccaggacatccttttttttttttttttcttttgagatggagttttgctcttgttgcctaggctggagtgcaatggcgtgaccttagctcactgtaacctccacctcctgggttcaagcgattctcctgcctcagcctccccagtagctgggattacaggcacgcaccacaacgcctgactaattttttgtagttttagtagagacagggtttcaccatgttggccaggctggtcttgaactcctgatctcaggtggtccacctgcctcggcctcccaaaatgctgggattacaggcatgagccaccatgcccagcctcaggacatcctttttaacgggcttgtaccacatgattgggagtttgaatgttagtaaccatgatagaagatctccactccaagggcatcaccgtgggaggaagcctgcccctacttaccatgtaaatatttagccatttcaatatatttgttctggacttgttcttcttatgtgtgtctcctgtgttgagtctgtttaattgtaggttattattgtgtgtctatattgatgtcatttctttaagtacagacacagacagcattgcttcagctgcccccacccctccttttaaaaataacaccttacacaatatcccttccttgaggacatcaaataaataacttttgttcaagagcatatctgatgaggtggctaacttggaaatttgttcctaggcagaccttgtgacctctgtttcaatacatagtgagtggcctttgctcccattttatgctacagattcactctggagatagaattggttgcacctctccaggcagtgagtttggagagcccttggtggttaggatgccatttgtgctggtggcacagaaatacaagcagtaagcccagagttgcttactctccactggaggtttctcagaggctgggggggacccgagactcctctgcttcaactccgctctactatatgccactggaagtgtagctgaggctgaagggtatcaatgttggtatttatcaggttggactcccccaagtgccctattttcatacctccaaggagcaagtgattcaacagaactgttttcttggcctcaaatgagtctaagaaggggaaatcacttaataccagccgtctgtgagggaccgatcacaaagctgtgtctttctaatcctccttgtaaatcaaagggaggggaatccccagagcccaggagtacacatgaatagaaagcaccacaggtaataaaaacacctaaaaaggtcagcagaaactcggggagctgctggaaattcacctcctctgcctttctatgggactcagtgggcagtgatcaggtagcaggcaaggatacccaactacacaccaaagcaacttggccacaggacacgtacagtgcagcagaaggctggtaggatagtttcttccacatccatgtgaacctcagagtcatctgaccattggccttgttctcttccaggttctagctggccagagacttttttggcctcatactaactgcaaaattgcacacagttggcgaatacaccactggaagccactgtggctgcattgtcacagttcaccaattgtgcatgttatttcctgcagtgggcccaagatcactgacaggatgccgtcggggttgggctgaaggtggaaacagcacactagcttgctgtttgtggcctctttacaactgccggccccatctgagatccggaaccaacacgtgctaacctcagcccattggggccagtggggcagccagcagtggaaccatagctctccacacctatgtctatggcacggtagctgccggcccacagtttccactgcatccccttgcatgtgcaccccaagagaagtaggccaaagagaaagctgccttagggagccacatggttatcttgtgtgtttacttttgccaaatggcagacacaattctacttcaatgcatttttctgaactcagtggtcaaaagtagcacggaagcactacttgcgtcagccccctctgtgattgagcgagtgtgtgcttgtgcaaagctgaggagattttttttcacctcctccttctgcattccctcagactgagccactctcttctttaggggctcccctactaggcagagtgtttctctagctttgcctgtggatttcacagtgaaatctacagaagacagttttcctcagggctgataataagaggtatgaacttattaagattggaagcattctcaccataaacacaaattatttcaagttgctccttcatccccttttccttggccactgccattggttctgtgtaggatggatttcttaaggttgaagataagcaatgcaaaggtggaattttgagtacagcactcatcctaatgtgggtgaaatatatgaaacatttattctaagcagactgctacattaacagttgttatacattcattctctgcatatcttttgtggactcaacacttttaggtacagagaggttaggagaatttcccagaattgcacagcaggttagtgacagtgccagaaataaaagtctgcctgactcccacacccatgttttcttcaagccaaattgaagtttggcctcttctccacaaatatttcacaagaaaaattccccacagcctttcagaatttcccagaaaacaattgttgtgcagtccttcaagatggaaatggcaggctggaatattgaaaccttatcagcttttattctagaactgacagttgatattttctgagctgaagctaagataaaagtttatttttgtgttttttttttttaatcgtggaatgatttttgattttccagagcatggcaaaactaagccagcaaatactaaaaccacatttgtttttgtgacgctcaaactccgtaacaaatattgggtatctctatacaaagctggatgtggacaggaagggtttgggatggggagaggcatgcgtctgggagcgtggcctttctggacctaccctgttctcactctcttccttctgcctcttgccctcattgctttccttattctctttcttcctcttgtctccttctcacctccagctcctaccacagcagacaggttggggcagacaccgtcatggttggggagcaggaggacagcatggggaaaaccactccaggcctttctctcaaaccttagtgatgaaaggactcaatggacctgaacaatttctcacaggaaagttccggtctctgtctccttaaaagcaaggcattcagtaacccttaacagagccaggattaaaacttgaatttctgacttatcccaggcctctgtttggatagaaaggctaggtcactgtcatatatggcaattaggatcacttcagatacaaaagtaacatttttaaagctgtgccttaagcagagagaccatttttagtacaaaaaggaaaaaaagattaactgtgccttcagagctgatgaaaggcagagcctcgtcactttgaaagcattggatttagtgccaggcgggttggtgagtagactcagcacccacattctcttcttgcgtctctctctggccacccagattatccaggggctgctgtttacttgagagctagaagtatcaggacggactatcactgcacctcgccatcctggcccagttaaagtgattttgaaacttcctgatgtgtgttagattgtggcaggtttctgccagggagtgggcgggaggaggaagcaggtgtttttatgggctagaaatgcccctgagatgcctgaggttgcttcgtgaatcctctagcccagcctaccccttcaactctgttgcacagagacatgagttccatgaaaaatttagtttcaaaacttcccgtgggcgccggaaatgataaccacatgttatcaagagccactgaaaaccaccaaaaatttgtcaaaattcatataagattgcctcacatacttgactttcatagaagcggaagccattgacctacttgatttatggtatttattagcagagtctgaaaagacttttatcacaagattgatcttgttacagtgtagcatcttgaccatctttcagtgtatttctggatattagatttatttgtttattacttttataggtggaattctctagaccatgacattaaggcctggagaagtcacctgtcagtagatctgagctgagagtttctctctcttctcctgtgtcccatgttgccttaggaaggagagcaggcagggaagcctgcatgcccttatctcatctgtactattggtcttaggtgactccagttcacttggtggaaaatggggattacaaaatttgcctctcagctgcccccacagaaatctcagtgatggcgtttgtcagattcttgggtccttaaaaaatctgacttttaaatatcgaataattattttgctgatcatgaatatctcttctgctgaccaaacaggaccagatatcacattccaacctattctatccctggctgaccacaaactccctcttctttgtcccccaccaaaagtcaggtaaaatgagctgtttctatcaaaggctgtgtcttcaggcctggccatttcccactcaggtctccagtgctatccaattttctcttcacctgtacattctagtactcatggaaggctccagtatacaaaatggctactcatggggccccctccccttccaccccaccaaagatatttctaaccttcaatgtagagtaagttagaattgacatatacattgtcccttaaaggccaggaacattaagcttgagcagagggtaggtgtagcctgggtatagtctagtcatagcctagctaaagaaagatgagtcagctgaaggcagagggtctgcattgggcacatagactggcagagagttgggctcagttggctcaatcctctgactaatgaccagttaattctgcttattctctcttaactcaaggtatttgctgccttaagctactttttaaatacttagtggaaataagtcatctattttcattagtgtgtgtgttgtgtgtgtgttggttggattttcctggccaggagcctctgccttctgaccaaaatgacattgattcccagccttctgccttagcagttcatcccatctttaactggttcccctctatctcttttctctagcttatatgccttgctggctgtgaaaggaggacctactgggtggtctatgaatctataccccgtatttcttttttaaagatcttaatttttctccctatttttccttgtgggaaggcattaaaaatgggactcaaggtctatgtgacactatatgaggtgccatttcctatacaggtgcacctctgtaagcagcatacagttaagagggcaatgcaaagaagctttgggagtaagcattctctcatatataaagttgagttgagacagaagttactttatacaaatatagggtttcttgttccttctaataggtggatggtattcttcttcctcgagagaagctgattaagttggattctgtctattcctggcttcagacctaatcatgaccattaaaaatatctatcttttcctttgtccaagaatcccactctggtcttgcattgtaattggtggtgttgggggtgtgttgcgtgttttcaataagccttattttagggaaatagcaaaaatagcatatgtactttcaattaaattgttattgcttttgaacatattgacagcaaatatttgttatttgtcagtagtggcctatatgctgtataaaagggaatcaggcatgggttttatagctaaacaagcaaggtataaatcagcaaaggataactaatgacagtggtggggtaacattttccataggccgggtactgtgctaaggactacctgtgcgttatccagctgaatcctcagaaccatgtgagctaagtattatcatacccagagagactatgaagcttgctccatgtcacacagcgagtaaatggtagagcccaggatctaagttcaggtctgattccaaagcccttgtcctaaacactgtgcaaattgctcttacacaaatttagtactgagcatcagaagactcagtctttcccatggagcaaagcagcaggaaaaccccatgaagcgtcagttagaaaccagactgtgttgagtctgtttataaattataatagtatttcatgtgttattttaagagtatagttttcaagtctcttgattgcctcagaggaaaatatacctatagtcttcttcccaagttgtgatgattgtaatcaatgctttgggaaatgttttcattctatcctttttgctgaaaacagatttagaaaaccacaacaattcagtaagatggcatgattagcaaagccctgagtttggttgctatgtatccctttggtgatttggctttaagacatgtaattaaaagggagaggattattagcaaaataagttaggagcttgttcttttgccattggggagtgaatattttcttccccatctactctttcaccagaagtggaaatgatgctgggtatcttttgaggtatatctgtagttcagttttaggttctgtaaggtagcatttcattagttctgtacaataaaaccgtcatctcagtacaggtttccattacagaaccagtgaagtgagaataaaactgaggaaaagtggtctaaatattttagtcagtgccttgtcattgaatttgtaagtttctggagcatacagtacctttatatcttgatttcccccatgtatatggtgacatgctttgcatggtaggtattaagtaagaatttttttctcattactattaaccatatcattggagtcccaatcattttcaccaagccatcatttaaaagaatcacaaaaatattagagctgacacatttagatctctcagaagttccacattttttttaactaagatagacaaatacattattcagtttattggtagataaagcacatagtattttcagagcaatgtcagtatcttattggccttgatttaaatgactatatttttcttactaagatttttacacaaattctttgcaattaaataaaacttaggaaggactaaaataggtagaaatgatcaggtaccaaagtatatcctgatatagaaaattgtgatttagtgttctattgttagaaccaactgcctggagcctatggcatatactaatttattaacctgtatatgctcattctgaaggaaataataacaataacaacaattgcttctatttattgaatatttactatgtgtcagatactttaagtatcttacattgattgtctcatttaattctcataaaaattctatgagatagatattattttacctatgaacaaatgaagctcaaaggtacacaggatcaaaattggaatttgaacccagttttactgaacttcaaagctcataccctatattataaaagagaaatggccgggcatggtggctcatgcctgtaatcccagcactctgggaggccgaggtgggtggatcattttaggtcaggagttctagaccagcctggccagcatggtgaaaccccatctctactaaaaatacaaaattagccgggcatggtggcacaagcctgtagtcccagctacttgggaagctgaggcaggagaaatgcttgaacctgggaggcagaggttgcagtgagctgagatcacgctattgcactccagactgggcaacagagtgagatcctgtctcaaaaaaaaaaaaaagagcaatgaacacagttccttatttatactcatagagctgaacagttatttcaaggaggctacttgaccatttccagccactttaattgaagacatatcttaggtgattctcaccagtctatggaaagtagcaatacgaaagaatatgagagataagattagcaaatactgagtggaatcctgcaatatctgattattgctgcagagtgactggagactcacaagcccagtgggcacacagaacttaaaagattgtctttgctactcgagtaattcatttctttacctgaccttgccgtcccggtccctctcagccctcaattaagctgccattgatataggatttataatgtgtcactggtccattcaggatacagtgacagaggtgtggctgaaaagctggataataaaaaatggaggcaacttccatttctgttcaaatcagggtagcaacaaaaccatagctgacccttgtttcagaccagcacagtccagctagacaaatattccaagcactgaattgtgcactaaatgcctagtgcccctttcagaagggacattgcctctgagtgaccaagatgctcatagtttcttcccacgatgagaacatctaaaccttggaaaatgattgtggtattcattatgttataattttccagaaaagaatctgtatttattcttcctctaggcttctaaacaataaggtaggttttacaaatgagaattttttaggaatagtttcttgactataccaaatttgaaaatttgtgtggcattcgaccacatgaattaggtagtattagagtcctttccagggatcttaaatgttatgaactttattttgtataagtaggattatgctcatttgtgtcttaaatacacagtgagactttggacttttttttgttagaattttatgttagaatttaactatttaaaagaggagtgttatttctttagagtcaaactcattcattcctatatcacaaatttggaaataaaactctgacttttaacgataacaagcaaagaagccacaggcatccaaattttattttatttatttatttttatttatttatttatttatttatttgagacagagtttctctcttgttgcccaggctggagtgcaatggcacgatctaagctcactgcaacctcggcctgccgggttcaagcaattctcctgtctcagcctcctgagtagctaggactacaggcgcctgctactatgcccggctaatttttggtatttttagtagagacagggtttctccacattggcaaggctggtctcaaactcctgacctcaggcgattcgcccgcctcagcctcccaaagtgctgggattacaggcatgagccactgtgcctgtccccaaattttaaattattaattgtattcaacaccagtaatatcttaggttgtggttgcaattttattttattttgtttttaatttatttttatttatttatttatttttgagatggaatttcgctcttgttgtccaggctagagtgcaatggtgcaatctcggctcaccacaacctccgcctctcggattcaagcgattctcctgcctcagcctcccgagtagagtagctgggattacagacatgtgccaccatgcctgactaattttgtatttttagtagagactggccttctccatttggtcaggctggtctcaaactcctgaccttaggtgatccgcctgcctcagcctcccaaagtgctgggattacaggcatgagccactgtgcctggtggatataactttaaaaattaaagtctgataaaatgtgtacatgtgcatttaattgtggttagctgcctattatttaaccaatatgataacacccctcagtcccaacttactcagcatttagaatgaattgatagaggttttactctgaaaaaagtcagtctatttcctcagttttctgggttttgaataactgctaggccttgccagataattctggcctaaagataaagctggtgaaagtcagggctggggttttgctacctgtgtatttatcagtcttctcctaaaccatagtctgccttttgatagctctaataattaatttggtcttccctgtctttcttctcccttgccccctaccccttctccctgtctgttcacaggttatcttgacgaatcagattacaacccatctgagtggagccctggcttctcaggcagacctggtgtctccagctgatgatttgtccctgtctgaaggtaaggaatctgtcctggagaggctgaaacttgacactgacatagagccccactgcctctccacctcctgttgagagctgggagatatggctaataggccctggccagtgaacccagccggagcctgttgatttaggtttggccacctttcctggcatctgatctcttatattggggagtcttttgccctgcctctataagggagctccatttggaggccagtcactcctctgtgtgttatttcaagtccttagtatgagggctgatgaattgttaaatgactttgtttttgagactgatactcaaaggttggctttcccagtggtcccctagcaatttagccttttgcttgtgctgagttcttttggactaaaaagcgtacatcagtttcatgtgccagagatatgacattcctgatcagctttacagaagattaagaaaaaaatctccacgctggtaaatctgcaaaattttctccaccctcccctgctagcaaaggtcaggctggctatggtttcgatggcaataagctttacgtagctggggaaataacaccaataaaccagagggtggtttctagttttattgaaagtgcttacttgacatttctgagttgttatccttgtagtctagtatctttcatgcagaatgctgtgggtctgggtagacatgcatagctcttccaggcccctcctccctttccactttctgagaattgctcatgaaggaatacaggagacttttaggcctagcaaggctcctggatggctgcccaggtgatcttctgcagatcagctttgctttatggtcttagaaattgcaagaaccacacctctgcttcttagtggtggctttaggagggaaaactagtggctaatttatgaaaactgtacaatgctttgtgtacgctccttccaagttcagggatacatcatcataacccctatcagcgaggctgaaaacctgaatcatcgagcattcctccctcctgaaacttttgtcatcaagtctgcttagtacttctttccgcatgtatctttcctttgtcccctcttttttgtaatgtgtgttgtgatcagcagatttactaaactcccaattgaattattttaataacatccagattggccttcccagctctagcctctacagtttccattctgccactaccaaattgaacttccccgtctggccttgttctgctctgttgctctcctactcagaaatcttagaatagttttttttgtttgtttcttttttgttgtttgttttgtttttgtttttgttttttctgagaatgagctaaaatcagtaagctgattttaacatatttagggatttgggatttgttagcttgaaatcagccatggtgaaagtatttataccatggaaatcagcaaatgctgaaaatcaggtggcttgtttttttatttcctccctttgcgtagactggttttcaaaacaccactagataaagtgaatgatttcaacccttcataatctgtcatttcctttctattcaaatttagttcctgccgatatcttaggtgaagctcctatgccaagtgtgccactcttggcctgcccctccccactcccagctccaggcctgtgcagagacagctcacctagaacagtgcttccccctttcacttcttctgcttctcgtcccacatccactccttcgaggcttatttaaagactgcctctttcacagaacctgcttgcctatggtctcagtctctttttcctctgtggccgctctatctgctcaactgtataaagaaaaagtctagaaaattaatttaacttttcatgtttttctgcctaaattggcagattttaaagacacgaccatgtcatattctttttgtatccatgttgttatccagtgactagcaaagttctagacacatactaggcagtaaataaatgctgaatgaatatcacagtaaatacttcagaagaacagtgaccatgagaatcatataaagcacctatgaacattgttaaaaattgttataattattacacacacacatacacacatatacacacacacttaattcagctctgaggagaccagaatagagtaaactgcttccttatttgaaaatcagtaagtacttttatttgtgttgccttcctggtttatcttaagcaaagaagaagagcaaaacacatagaaaagaaattgcttcagggttgcagtataactgccacaagaaacccctgacttgtgttcatagcaaaggaagagttaccaggttatcctcccagaaatccaacaaagaatggaaataattgatttttctagattttttttttgtatagctgagcagataaagaggctatataaatatattcctatagtctataatgaaggtttttattagtggattaaaatgaacaatgtcttagaacatttatagccattcaaatatattacaatggatgttaagttcctgtgatttacacacacacagacatgcacacgcatgtataaattgctctgttttgcttcaagcattcattgtatcagctttgccattgtgttattaactgtggtgttaggcaggcccttttgatgactttgggtctcagtttcttctgttacatgacaggttggaagaatacaagattgctaaagtgttttccagctctagcatataagatcatgaggtaggtctgaaggtcaggagcattcacccactgatggggttttaattctgacttacagagtaggaagaatggccgtgttgctgatgttgccctagattaaacacaataaaaaggatctttaataaatcttagcactgatacttcggcatacctgcaggagcctttcctccctgtatgttttctctttgtcactctggggacacttctggtcttgtctgtctgtctcttgctctctctgcctctctccacacaaaggtgtacaaaatcagaagtgtgtgcaaaccagtgagaatgagaaacacactgggatggggtgactggtcaatttgcataagttccaaaagttccattctcccaatagtttgtgaatgggatagtttgtgaaaggcaggctgcaaattgacaagcacactgcaaatatgaggagatattttaagtaaatagagaaaattcagtttgccctctcattccttctcaaggcacaaagctcaggggcaggagcaatgccgggaaagtccttggcccttggggtgtacttctcccttctttggctctcccacctgggagctggataactcaacagtggaatgaaacctcaatgaagggaattataccatgatgtcaagcagtgaacatgagtctacttaatccaagccaacaactcagccacaaatttaataagggtggtggggcggggagacccagcaacacaaaaacaaagaactctcaactttacaaacactgggagggcaacagctggtcagccgagattaaaggagcgtgagagagcacctcccatctcctgacttctcctcccccatagacgtccctgcagccagccagggctcgctttttacagccctgtgcagatgaccttgttccagctaagataggagctcttttgatctcagcagggggatgctctgggcctgcagctggcagatattaatagtacaggatctgttggggtggaagagatctctcggttgggccaggtcacttgtattccctcctctgcatcagagcagaagggacttcatttccctgagtcagcccctgctgcgtactactcctcttaggtcaactcagatcattttatcgctggctgctcttggctgcttgttctcacctcacaactgttttcaagggagcactgtttaagcagtgtactgtgcactgcagctgaaatctattacaggacagggtagaccttgccccccgcccccaaatcccagtgtgtgtctcatactcactggtttgcacacacttctgattttgtatacctttgtgtggagacaggcagagagagcaagagacaagatctgaagtgtacacagagtgagaaagagacagcaatacaggaaggggagactgttgcaggtatgccagagtaccaatgctaagatttctgaaggtcctttttgttgtgtttagggcaacatcaacaacacagtcatttttcccactctgtaaatcagaattaaaccctatcattgggtgaatgtttctgatcttcaggccctccttatgatcttaactgttagagctggaaaagactgtagcaatcttctagtatccactctgtcattcaacagaagagatagggacagaaataaggattttttctacattgttctagactaggtactttgagtcacagtattttcttcttcagatttcatttcattgacagaagttcagacatataggttattatagagttccctgctcagttattgtgactgttgtgtggccaaggacacatttcttagcccttgccaattcttccttatggtcattggagatactaagaactgttggacctcagtcataggtaacatctctttcccccagagtgattaatagagaagggatctaacagtccaaatggcctaagatgccatatcctattccaaagtcacctgggatttgagcagaaccagatgagtgcccacctacagttggtaggtgagatttgacaaatggtaacagtgagccctgtgcaagattgaagctatagaccattggcttgctttcttctgacgatttaacagagtagcagttacttcattatggtgacatggcccacttcaggagttccacatggctttatggaaaagaagacattattaggctgccatcttggtattcccagcatctggcatgttgtatcctgttttctgcattacttgttttccgatagaccatagcacatgaaaactaaaaatgtaaaatgtgtggataggtcaaggaaagaacacaagagaaatagcagcacttcctagaaccaagagtggtttctagttttattgttggaaggctttctattctggttggagtcaggggaattgatggctgatttcatgtgcaagagaaagtatttggggattcatattccctaccaaaccatccctgcgaaaagctggagtccatttgaaagattatatgcaagtttgtggcttgtgttctcttttaaaataagttcaacaagcaagacagctcagaatggttgggacaaatcagagactcatggttgtgaaagaagcaaacttcaaagcgcggtatgaattttcaagtcttatttccactcttgctttccagctggatctgctctggatttactgcaggatgtttgaaaatgtggctccctgctaatctcagacagttgctatgatcaatggtttctttcatttccgataaaaaacactggtgtttctacttaaattgtgtgtattttcagctttattattatagttatgatttattgtcctgcattacccaaatttgtaatccattaaccacagactttggggtgggttggtcaagttagcagaaatctctacatgctttagctccaaggcccttcacagcccaatctcagactaaatgttcattggtttgtgtagggccatgtaccaacgggtatgagtggagtagttttaaaaatccactccttgggggtatggtgcaagttggctgtaattagtactttgaaagcctaaggtgtcaccatgtgactacaaagttaatattaacaactatgatcaacattattaacattagcttttccatagtatttttaattgtcttaaaatgatgaatttcttaatctacctcaagcaactgaagcatgaaggagagaagagaattgctgaaaggccacacagtgagagctggtgtgctgggaacagaagtcagagcccctcccgtgaagttttaaatttggttactgctgcctcttaggagtgagttttggataaaaatgtttaagtgtcctggtgacctttcagtttttgtttccaaagccatagactatatcaacacacacgattttacatggttctattcacaagggcacacgccggccagtgctctacttccctggtattcaggagtccatagcacttgactgggcatatgtcttccagcagctgttcagatgccatgaaaggcctgatttatagaaaaagattaaaagcaccaaaaaatgtgtggtattcggctaaagaaagcttaaatattatgtgagtaggggaggctagagttgagaggagatgggcacagcctgcaaatgtcagaaaagctgtaaatcccaaaagggagaggaatgtgttgaggattttcagcctggaggccagggggcaatgtaacctcagctgggagaacaaaaggagaaagggaacattaaagtcaaccaccaggaagtgcttcttggtcaggagctctgttttgctggtgctagtttgtcaaaaggaggcacatttgaagcacaagatgcattacaatcaagttagatgagagccagagaggtttctttggggagcagtccttgaggtagtttgtgtgggagttgggctagctttaaaagtagtttcccctcaccctcaaatctttttaccgtctagaatttactgtctaatttctcaaatctgcactgtttctgttaaggtctcaatgtcaagaaagctggagggacaaaaacaccaaggcatctttgtcagttgcctcagctagagaggtgacgacagggccaaaagccgagagaatgggatgccaagaggtggtgtgatcccagaggccttcaagttagaaggactctctgagaagagatccttgttttccatcactgcagagaatgctataccaagggcgagaggcctctaggtcagagatcataaagaagaaaagaatggctggattttaggggtggtgcccaacgattagtttgtgttgtaatgtggcatgaagcgtcttcagaatgcatttgcgatgtttactgggatttggaaaaggatcgtaacaaggtctagcaaggcagtctagcccaaggagggtccagttgagttccgaactagtttctgatatctatcccttccaaaactgcatgtttaattaaagaacagccctcctctatcttccccagatagaggagggctgttcttcagtcgaagatatggagtggttgtgtttctctaccaaaacctttattccattttctcaaattttagcatacatcagaatcacctggggggcacattaatacacacattatggaccatatactgtatgcctggcatcgtatgtttattatctcatttagtcctcacaaccaccctctgaggatagtgcagttggccctccttatccatgagttctgcatccatagattcaaccaaccatgaatcaaaaaatagtaggggaaaaatggatgattgcatctgtactgaacacagacctttttccttgtcattattccctaaacagtacagtataacaactatctacatagcatttacactgtattaggtattataaataatctagagattatttaaagtatccaggaggatgtgtgtaggttacatgcaaatacagtgccattttatataaaggacttgagcatccatggattttggtgtctgcagcgggccctggaattattcccctgcagatactgagggacaactgtattaattatcccattttgtagatgaaggaactggggcttagaaggctacacaattagtggcagagtcaggatttccacctagggagactggctccagaggtacatttttatccactaagctcttttgtaaggatacaattgagattatcatgactatgtataaataggaactaaaagacagccagatcacatgggtattgggaaggttgaaacttaggttattctcttcatttatctcatctctgtcttgcctttccatgacactgacacttgactttatgatctaattgacccattttatctttcacacctagtaattgtgttcatgggttgccttttcatccattcagccataacagtaaagaagatggccagtacacctatcctttcagcagggtccattgatggggggcattttcttataaggggctatatatgaaggacagattccttttgaagggaggtaaatacccaaacataacatctaatagaaggactttgtccagctgagcagatattataagtttgttaagtaggactgtgtagctctgttgacccctttagtcattttcattctcagcatcttctccttcttccatttattatttatttatttatttagagacagggtctcactccattgccctcactgtagccttggcctcccaggctccagtgatcctcccacctcagcctcccaagtagctggtactacaggcatgcaccaccatgcctggctaattttttcagttttgttttgtagagacagggtcttgctatcctgcccaggctggtctcaaactcctggcttcaagcaatcctcctgcctctacctcccaacatgctgggattacaggtgtaagccaccacgcccagcgctctcctttcaaataaaaattttgatagaagttacctatcactagtccatgccatcaagccaatatactgttttaaaaatgaaatgtaaaaatattttcttttagccccaggtaacctggctcctccttgatctaattttctttataccaataatcagcctttgaatttgtcttcaggaggggagagacgtctcttctgtttatccagaatccactcgctactctaaactattattatctggtgagatatgaggcctaaatttaaccatgtataagttacctcatattcagggacatataacagaggcacattagctagcgcaggctgtccccatggtcagccatgatctatccactgcttgagcaagggaagccagagaagacaagagggcagctggataactaaaatatgtgcagtggagaactctgtgtctgttagttacatccttttcatgatttacggtatacaagagcaaaattactctctaccctcaggggagtgtctgagttttgtgggttaaaagcaaatgtatatgtgtatatgtgcagtgtatgtgtgtgtgttgaaggtggaggttcccgtctttaatagaaggcctttttaggttatgatgttgattttttttaaccatacttccatctaataggctcatcaaagcagctaaggtaatcacatttcctggcactgtcatctccagctatagaggatgaaagaaatccagtggacaggtttaaggagacaaatgtttttttgttttaaaatatgatgtttaggtaaatgaagctagaaaagcctcaaaataaattccttctgagtaggactctaggccagagatagaataagcaattgaaatctttcaatgtagaccccagaaaacaaacaacagtcgataagtggctgccagagaccaaggggtggatccaaggccagccaggaagaagtttcttcctccttcagggacaaaactagaactgagggaaacagctcttgccctttgactggatactacaaaactaaggtaaaccagcagaaagtcctgtcttagggtcattagaatgtgaggttttttttttgtttgtgtgttttttttttttttttttttttgagacatacttttactccatcgcccaggctggagtgcagtggcatgatctccactcactgcaacctccacctcccacactcaagcaattcccatgcctcagcctcctgagtagctgggattacaggcatgcaccaccacgcctggctaatttttttgtatttttagtggagatggggttttgccatgttagccaggctagtcaaactcctgacctcaagtgatccacctgccttggcctcccaaattggtgggattacaggagtgaaccactgcgcttggccagaatgtaagttcttgtgggcaggaatttttgtcacttttgttcagtgctggatctccacatcttagaaaagtgcttgacaataatagttaataaataattgatgttaataaatactgtatgatgaatggcaataggcaattcagggaaccatgtgagaaaggaaagaacagaagtggaacagctcagcttttgaaggagaaatctcccaccttcacacaagggtggtgactgagtagcttagtgtgatacactataatgatatttattagccacctaccatctgctaggtcatgtgttagacaggtgcttgggacacatagacaaatgctacagtccctgctctatgggaagctcacaatcaggggaggggaagggctgtggctatgacggacaagtaagcaggttacatttggtgtcatgatggcattaggtttgggatgtttttggggaacagataggagtcctggcttggggatggaggctctctaggaactttacaacaaggaggcatgtgaagaattaacagcagttcttaataggagagagagaaggggaaagtgcacctgacagagggaaaagcccccgtcatggaatccaggcaggggccggattgccgagaccagctcggttggggagaccctaacccagtggcgctagaggaattaaagactcacacagaaatatagaggtgtgaagtaggaaatcaggggtctcacagcctgcagagatgagagccccaaacagagatttatccacatatttattaacagcaagccagtcattagcattgtttctatagatattaaattaactaaaagtatcccttatgggaaacgaagggatgggccaaattaaaggaataggttgggctagttaactgcagcaggagcatatccttaaggcacagatcactcatgctattgtttgtggcttaagaatgcctttaagcagttttccaccctgggcaggccaggtgttcttgccctcattcccataaacccacaaccttccagcgtgggcattatggccatcatgaacatgtcacagtgctgcagagattttatttatggccagttttggggccagtttatggcaagattttggggggcttgctcccaacagaaaggtcttattcctcatgctgatcagtttgaattttttcctgagggtaatagggagccattgaaatagggaagtataaagaaaatgtggcacatacacactgtggaataccatgcagccataaaaaaggatgagctcatgtcctttgcagggacatggatgaagctggaaaccatcattctcagcaaactaatccaagaacagaaaaccaaacaccgcatgttctcactcataagtgggagctgaacaatgagaacacatggacacggggagagaaacatcacacaccaggttgggggctaggggaggtatagcattaggagaaatacctaatgtagatgacaggttgacgggtgcagcaaaccaccatggcacatgtatacccatgcaacaaacctgcacgttctgcacatgtatcccagaatataaagtataataaaaaaaaaaaaaaaaaaagaaaagaaaaagaaatacggaagtgacggagtcattttgtagttggaagcattttctcaggcagccatttacaggttagggggatggagatgaaactatagaacttggattttgatctctttgaggcaagtcactttggggtggggttagccctaaacttcttaaagcaatgagaactttagaataagttttaacctttctgagatgttgggtggccaggtctggttctagcttcctaccttaccaacccaggagagatttctttggtataccagccttctgaataacatcaggcgagccctccatttatcaaggcgcctaacagttagaaatggtgtcaggctatctataactctgctaggatgtgagagaaaatagcaaatgacttaaagtactaaatggaactatgagggctctgtgtggtggctcatacctataatcccagcactttgggaggctgaggtgggcagatcacttgaggccaggagttcaagaccagcctggacaacatggcgaaacaccatctctatgaaaaatacaaaaattagctggatgtgatggtgcatgcctgtaatcccagctacccaggaggctgaggcacaagaatcacttgagcctgtgaggcggaggttgcagtgagcagagatggcgccactgcactccagcctgggcgagagagcaagactctgtctcaaaaaaaaaaaaaggcactatggaaattaatacaagtgttatgttccttttgctaatgattgcaataataatattgagtgcctattatgcgtcaggcactatactaagcacataaaaatgcaacaacttagtggggttcaattatcaccctcaatttagaaacaaagaaactgaagtacgaagtatttccataacttgctgatgatcgcataactagtaattagttggcattcaaacctagagtcttgctctagagtctgtgctcttgaccagtataccatactcagctcttcaagatgatcatacaactacctcagctagagcttatgatcacatatttctgtcattgttagatttgagaggtttccatgcatcactataagtgcagctgtttctttatgtgtgccctgaaatctctatgctgatagtcagtagaaaagcagtgtgttttaacagaagctgaagcactgcatttagaattgggagacttgtattcaaggaccagctttgccacaaaccatctgtactattttgagcaaggcacttaacttccctggacctcaattccctcagctatacacataagagcttgcattaggtgaagctggcaggcctttcagtttgcttcttctgtcacattctgtcttcggtgagcaaattggtatgttcaagcctcagacaggcttctctgttcacctcttgaagaaggctggaccaacccatctatgagcattttgtcacatttcttttgtcactgttattatattggatatctagagcagcaatcttttgaatctataacccatcattttttagcatattgccccaaagtatggaaaattgctgccaaaaactatagtgctactatataaagttatataaaacacaccagaaatagaatttttaaaatatgaagtgggttctagtattttttccctacatcccgttgagtcattgtgatgtattcccaccacttggtatagttcaaatttctcccttccttgtttttactgcagaactctttactgtcccaagtagagtgagactgaaaccaaaatttgagcactgggtccattcattcaattgttcattcatttacacgttaagtatgaagcatctataatgtgaaatgcttgctgaattttcaggaggccataagaacggtatcaggcttggcctctcccctctcaaacataaaggctaattctagtgtttttcagttttatctggttggaaccctagaattcctgcatactgtaatgaagctaaactttacatctaaactggctatatgtattgcactacagtgcataagacaagaaaagttacaaaaagaaggaaaatccagaacgtgaggcccacagacatgaaacagttgaagtcacactgtagtacagcatctaatgaattgccaggatgagagaagcagatttttaatatcagaggcattcacagaaaggagagatcatcatgatctttgtgatggaggcttggaccactgccttaggatgtcagggcagaactaagatgggccccttggttggtctgtcctgactcactgtgtctgcagtgcctggatatcagccagcagaccacctccatcattgagttagacccacttacaaggtggcaggctattaaccagtcccctgttccactgagaacttgccaggctggccatcatagcatggtataggttgaagtagcttagtacctgtggtggatgactgtttttctcggccagctgtttaatgagcaccaaatgaagtaaaatgctgcttggttcctctcctctcttcagacacaaacaatcgagcacatcctagtggaagggccgtgttggggaactggctttcttgtgctgatcatcttggttcccacatccgtccctcccctctgggctagagtttggaggagctattgaagaaccttgagaaaactgttaaccttgaaagtttagttattcatcatcaaatatattaacaaacgtttgtagccaaagctttactgtctatggcagttttaaataattatcaaaatcatgatttaattaatttctctctccattttgggttggcttagaggagtaggagattgcaattcacaagtactttctggtcctgtaaccaacttgcactttcaagttcaggtaatcaccttgtccttttcagtttatttacccatgacttaggttaaagttgcccatgcctctggtgaaattcacaaatgaaacttcacctagctgggtttcatatttgtaagaaatcattttttttctccatgagaatgtgcaggtcagctgagacaagcatgattaattctagacatgaattagaacaagcccaagctgaacagctctctcagaggaagtcatctgaaattggtatgtgtgacccagtatatcttttgaccaatttgcattggaaaccacagtgagcatggaagaaatataaccttgatcctctggcctaataaacattcttgcaattctaaatgtacctagagtttgtgacaagtgtgtattggaaaactcgttgaaaacacatgagttagtaatgttctctttcagaagatgaacttgcatggccgaagtgagattccagtgggaaagacctggtagagaaagagtgggagaatgcgttgacctctggagggcagattatggcatgccaggcaatgggttgtgccatcagggaaggaatctagaaagacgaggagactcaggagaaaggagatgacttctgttgacaggtcattgttgctcagacttagtgcagatgagaaaggaaatccagaaacctacatgacagctcctcttggattggatgaaaatattgattttttttttttttccctatctggaatttgacagggtcagttcatgtctgggttttcagcacttaatacagggcgcttttgtcttgggaggcggctggactggtttttcctccaggcaggtgcacagagggcgtttattgtagcctgaaacacaaacaccaagcccctaggccctgatccacacactctccagtgtggctcaaggaaataaagtgaacaatgtctcttgcaacaggcgagcactgtaaatgccactcctgaatgatatatttcttaaaactttgtatccgtaacctgatcatctcttaaaacttaattatatgtcagagaaaaggaagctattggctcctccagctgtccaggttgaacgagagcacacaatggagcatatccgattcacagccttacttaggtaatcagattaatatctcctgaattgaatttacccttttgatatggagtctttcagctgccttgtttcacatctcaaattctgacaaagctgtgcggcctttgagtaatttccctgaaatctatatgtgggaagcctgtacttcaagcagtttttgggacttgcaccaattaaatctgtctctggcacacttttaatggcatgctttcccctgagtcaacaactgctccaaaatctgaagtcatttgtttaatttaaaagcaaaggttatggaacaaccatttcaagcttcaccagccaaactccagtggctttgaaaagggagatgaggcagaggaaaggctaataaactggatttcttatacacaaaataaattaattactgtgtttctgtaagctagtatcaaatcaagtttgttcacaccctccttgccaacctagctctccctttctcttcaaactcaccctctctgggctttcatattcacgattgaggctcaccctcttactgttgttcttgcaacacaaacatctggactggatttttgtcagctggagttgagagagaactgtaaatgatgcagtgatttttttttcgtccttattaaatttatttatagccagtctgaagccaggaaacatgctagagcctttgattggaggttctcgaggaatgtacggtggatggtattttctcctgttgttttctaaataatatcaaggatagaattacataactcccaacttgagtattttttgccctgaaggaccctttattaggacattttgcacatcagaattcttccattatatttgcttatccaatatgccttcttttctgtcagtgagagaaaaggaaatgtacatgacaggttatttctgaaaaattagaaagatggagagtgagtttctggttgtttgggacatgaaccagtggcatgagtattttcttttgccaaagggacacaacatggatcctatttctacctcttaacaacctctgcaatcttaaagctgccaaatctcaaagaatttcattcatttagtcattatttaagataataaaaggccctacaagcagcttacgaaaataatttataaaatatttttctctgcccttagaccttgttaaataacaatgccttggtgtttataaaattatttaagaaacaaaactttctagaggaggctgaatcagatgatgatttcttgaggtcccttcccagttctatgatttgagatgattctttaattttccttcactgtcatttatatctgtgtcattaaaaaaaaaaaaaaaaaaagggctgtttgggaatgagatttgctacacccgtaggcattttcttcttcagaaaagagactgtttagctttctgccacccaagtcagtcatcctcagcctgaacaatggagcttaatgttctccatcttcctaagagttagtgtctgttgttatgaaagtgaattgaaaccaaatgtactttctattggaaaagctgcccttgctctcagctcatggacaaaactgagagagaaggctcttacaaaacagagggaaaaatcctcgctgtcatgtcataacaccagttatttcactgttagacctatgaacatatctttgatgcaacactacactatttgatgatgtttctgtgtcacttaagatgggcgtttcatatttatctcttagaaatgttagcagatttttttcacgagttatcttgcttatggactggaaaagctattcttacagtaagacccttcattaactgagaaggcataaaagatagctcatgttctccaccaagaaaggaagctctgtttctctctgtctgatgggaagcatttgagacagagcagcttcatgaagtgtggatgtctgttacccacttcccagtttttaaagtaaaagccaagtcaatggcactggtacttgtagtgaaatgagccacagaggcatcattactcatcaccatcacgactcaaggatcagcaaatgagagtcctgaaggtaaagaatgtttattttcaggtagagaagaaagaaaaatcacggagaggtagagaaaagtgaagggcaaaggaagaatccagcagacattaagcaacactgtatcttccaagatcataaagccaaatagttcctgctagatttaacttttattattttgggagatgaaaatcactggggcatggagttctcattctgcatttaggaacttccataatattttaataataacaataatgataataatgccaatcactttaattaaatctccctaaataagcatcttttaatgcagtgttgtttgctgtaaaacatcccaactaatggtagaggctggatgtctgccaaagacatggtgagggaaccgccacagagccgctggtattggaccctggcagagctggttcctctagccaaaggaagtgaataatcatggggaagtggttattccagctgtgacactcaggaaatttcagtagaatgtgatggccttatatatggaatattcttagacatactaggatggcacatgtaaattatcatgggaaacataatttgaggaatacagaagattataaggtattatttgattcaggtttttttatgttagtttggagccattgtcaggcatggaaatactttcattgatattcctgtcttctataattcaaggccttaataataaactggttttgaatcaatcagttgtctgatagacggctcctgggaagactggagagccttatgagggtgcccacctctctcctgtgtaaaaggcccttcactctggcagcttcactcttgggtggtgttgggtagaagtaagatcagataccctgctcactgtaggatggaagggatcacatcaaagctctgagggctgttttccccttaggcatccaaacctgatttcctcttatcacctgatatgaattttcgactgtttcactttttccttctctgtgcttgtgttttttacaaaaccatgaagcctgtaaaccacacggtagatatgatcacaacaatattagtggagaaccccatgctgttgtcagtatcaccatcataggtatgagtgcttgatgcagggtgtgagggggaagggggcagtctttttaaaaagcaggtcacggctggacgtggtggctcacgcctgtaatcccagcactttgggaggccgaggtgggcagatcactttaggtcaggagttcaagaccagcctgaccaacatggtgaaacccgtctctattaaaaatacaaaaattagctgggtgtggtggtgcacatctgtaatcccggctactcgggaggctgaggcaggagaatcacttgaacctgggaggcagaggtttcagtaagcagagatcacgccactgcactctagcctgggccacagagcaagactccatctcaaaaaattaattaattaattaaaaattaagaagcagattacctttgaacctgtttagatagtggtcttccatccatcacctcttaactcctcatctcccattttcccaaccccacacacctcatctttgcatggatgaagtgcagtctctccagaacgtttttgtgagtggagggatgcagagtagattgtcggtgccatgtctacgttgttaactgcagtccaacatgtaatctagttaaaaaaagaaagaaaagaaaaacccataaaataaattttaatagactacccctaggcaactttgaagaggaaatcattgcaagaaaatgagacttactaaataggccatttgagaagcaggcaatggctattttaaaggcttgaggttttaatatatgtatatgccttttttccctcatctcttgcaaataaataatggtttacatcaggagacaattcaggaaaaaagccttttaaaaaattttcaggaaatctggccaccgtgtttctgcagccactgataaatgacaatgccaccagcagtgacctaggacatcctgaattcttgctcttctgaagagcttgcattctcttttcaaagggtatcctgttcctattgcaatctttaagctatctcagctcaagatcaccttttttccttttattatcatacttaaaacagcactagtgctgttaagaagactccacccatagatgttgatgtcatttgtgaggaggacaagatttaaagagaaggtaactgggccaggtgtggtggcttaagcctgtaatcccagcactttgggaggccgaggcgggtggatcactaggtcagaagttcaagaccagcctggccaacatggtgaaaccctgtctctactaaaaatacaaaaattagctgggcatggtggcatgtgcctgtaatcccagctactcgggaggctgaggcaggagaattgcttgaactgggacctgggaggtggaggttgcagtgagccaagatcgtgccactgcactccagcctgggctgcagagcaagactccctctcaaaaataaataaataaataaatagaaggtaactggatattggccccaaacatattctaattcagcaaacagacccattgaaactcagcattgttatttcaattcatgttgtacaaatcaactaaatacaattttgtctattttcagggataactgagtgttcttcatccacaaaggcccaagtccgtataggacagtagcacaacggggaagaaatgtgtgtttttttttgttttgttttgttttttagtgctgatgaaaggtgttatatccaagggtaagttataaacagagaagctgtttctgattgtgaagattggctcagcctgcactgacacttctgaaaaggtggaaagagcaaaatcgcagttccctagagtctctcagttgtgtgatatccatgcatgttcggagcagaatgtataacggatccaccgttctgcttctctgctgtcttctagtttaaaacatgttgcaggctaaaatgcagagggagaagattctattggtttactcatccagttattaagacaaggatgggatgaaggatcagtcttcacagacctgcaaattccctccagtattgaccctgttgttgcctgagggcagctgggtcaacaggtataacctccctttttttccctgaacaaaggtagctggactttcaaggaaaaaaaaataatccagccctggtaatcacacaaacagttctcaaagctcaattaaactaaaatgccttgtttcagtttctttccacagtttatagattttaccagcataattatcaaactttaaatgtttctctcttccattgtcttgttctgtttggttcacctggtgatgtttgttatagcctttctatttgaggaattagtggaagataaaatgttgctaagagcaatttcgttagtattgaaaatagcaggaaagaaatagagggagcagccattgttagcaaagtagcctggttatgtgtattaagcttgggaaagaattaaggccatttggtctattgatgcaaaataccttcgttttactaaccacagaaaaagcccttggttgggttgtcttgagtagttagaactgggggtggccaagatgactggttgctgatttccagcactgtgcatcaaccaccaaatgattttaactttcaaagtttatggggaaagggtacgatatgaattttgaggtttttgctgcttcttatgcaaaacattatttcggtttcaagcagctgatcacaattgcaactgcttatacctggtgaattataatattctctatgggaactgcactgcatgtctgtgggggccgtcccatctgcctcctttgtgaatctcttctcctttcagtgcctcctaacttgggccccaaagaggggtacagcagctgaatgtcattctcttgggctgtggcccaggcatgcatctttctggaaggatgactgaatcccattcttaaatctgaagttcctcttgattagcggctccttttgtttgttgtttttaacggcatttctgtctttcatgggtagcttacagggatgtgttttagagccccttccagctgggaagccgcccaactcccaccagctgagtcgggggatggcttccctttagttccgctgctgtctgtggactacaaggactccacttccagccccagcaacagtggcccttgtctgctgtgcaaacttggctctcttctctgggttttcattctccagccatctgggcattttgggcacccctcttatcttagtaccttggcactcaggaccacatgtcatcctatcatagagatgcaaacaaaggaatccttcacctctagcttgcagttcccctggaaccatcatagattgagtgacaatcagggagatgggggcttgggcattggtcttgagtgatataaatggtttttctaatagaaggcatttggaatgggctgacaatagctaggattgttcactaccaggattcttagtgcctagcttcctcctttttctctggctatcttgaaatctaggaggaaggagctaaagaccccgtggcctctgattgccatagcctctctaggcctggaagcttcagcttagggactagaatactgctgtgtgccagagcagttcatctagcttcctattaagaattctatgtgcattacccacttttaaaattcctcctcctacttcctcaacttctggcttggggagggtttgatcagagtcattctctcttcagagaagcatctggaaagattgatccaagagtgctgatagcaagttcgctatcatcgccctgcctcgaggaaaataagcattcgataaaaggacacttccactgcccagttcactcctactccactgtgtcttctcctgtccctccccctacccctctgacccctgcactcattctgatccctcttcctgcccgaatgtctctcagtggtcaacaaggcatgagctagccaaagaaaatgcaaccaaatagtgttaatcacttccatttagacctcagtagtcaggtggggctgcaggtctttgaaaggcagacttaaaatgcttgcctcttttcagcgaatctgattttacatttggctgctgatcattcagcccctggcatttgttcatacattggaagcccaaagcttccacacagttgagtctacagagcagagtaatattaacaagacttatcttggttatgatgccaaaaccatggtgccacttcatttcacaccaaagtggatggatcttatttatttattttttaagagttgaggcagcacagagaagctcagagattcattcaggatcatccactgtgtccaagctttgatcctctggcccttatgacaggcaatgatggttcagagtacagacagagctcctgtagagcgtgcgaccaatttaactggaaccatgggttcttaattacgacttcccctccccacccactgccaccaccatccagttgccagaacccagttggttttctgtgaaacggcagctagtgacactttgcatgggttcaccagaaggcctttcagtctttgtctcattttaattgtgtatctcaaccaagaagatcaactctccacatgtaaagttaactccctttagttttcaaagtttctttccaagaaccacctattgtcagtccctcatcctgtgtctggcaaacttagaagaaacaatgaagttcacagtacagactgagctcccgaagcactgatcttttatgtatctaaatgagggaagaaggaatgcatattctctggcacaagctggctctaccatgtgatttgaagtaaatggccattttatttcacattaggaggagagacttggagcagtttggcagcagatctgtagcgggttattaatctaagaactatagttttcttccacataggagattaaatacccatctttcgtcagatcaaagcaggcctcttggactatctgatctttgcaaaaggccccatgttgggccagcacaacagtctttgcatgtattgctccctatgttaaaaacaacaacatcatcatcattttagtatgtgtaaataataaggtctgccagcattagcagctctctaggcccaaagtaaaactttaggttttttttctttttttctttttttgagacagagtctcactctatcacccaggctggagtgcagtggcgtgatctctgctcactgcaagctccacctcccgggttcacaccattctcctgcctcagcctcccgagtagctgggactacaggtgcccgccaccacgcccggctaatttttttgtatttttagtagagacagggtttcaccatgttagccaggatagtctccatctcctgacctcatgatctgcccgccttggcctcccaaagtgctgggattacaggcgtgaaccactgcacccagcccctaaaactttagttttacttgaactgactttatattaattttctactactagaacaagtcactgccccccagagtttgaagaaatgtgaatattaactagggcttatctgaatgagaacaacagcattgctcttttcgtagtgttgtaataaatatcatcttagacttatacggcattttctttagggcattaatagagtttatataacctattgttcatttacttgatagctcattgagacagtttaggtattgatgctatattcaccatctataaaatgggaagaataaaaatattaagttcaacttaaatgggttacaagaaagaatacagacatttgtatgatctatgtctccaagatactgcctagagcttttaaactttgtaagttctgcatttcacctacccaagggagtctgagagtgtgtaatttgggccagggcacaacagcccttggccaggttgaagtggacaaacaaatggaattggttccagtttaccaacctggcacgaattatgtgctggtcaaggaagtgtttttcaaatcatggggagccactagtgaaaatctactggtgctttgatggtggcctttggagatacttttataatttgaaaccattcccatggcaggccagggagaggtcttactttagccaacatgcaacattaggtagaagaaatggggcctttctgactggtttgacctgtgggtgggccctcttccacatgtttctaattaggatgcaagaaagagtagatattctgtggcgactctcctttccttctcggctgtgagacagaacaacagcgcctttgtgatgacctttacagggctgtttacatttggtgacctgcctgaacactcccgccagagtggacgcacctcttggctaatgaggaacagccatgctgtcttttactatggtagaccttggaggttaaaatgaaaaataagaggatcctctgttgatgactagtcgaagttaattttctttacagatttattgaggtataatttacatactataaaattcacccattgtaagtatacaattcaatgatttttagtataataaatttataaagtcttgtcatcatataatccagtcttagaacttcgttggagttattttgaaaacaccaaataatgatcataattggaatgtagatcatgctgaagtgaaacagaaatttatgaggctatcttgggttaaggaagagggccacccaggaaactatttgagacaattaagtctcaagcttctcaaaatacatgaaaccttgagattagcacttatatttcagaacattttccatatttttgcttaccaaatggtatgacctacttgaaaaaaaatgagaagctgctgcagaacctgcctcaggtgtcagcatcaattaatgtttcatggttataatgagaaggagcagaagatgagagtctaagctccccttaaagggcttatagttcactttgaacatatttatttacgtgccctctcattttcaagtactgtgttaggtactgcagacacatggatagtgagacaatgtctctacccttaagaactagtagtccagtggtttctgttaaatttcagtatgatgtcataaattctgtggtaaagtgccgtgtgatgtcaggaaggtcatcagtaaagactttctagagttgatgttactaagaaatcaatgacatggttaataagctcactagtcctgctgacactgagtccctaccctcggctccatttggatgaggctctgtgagatccagtccctgccttgggggctttgtcattcatgagagaaacaagtccatcactccttccagttagatatctgtgaaaaggtggaaaaagcaaagaacacttggaatttgggagagaaagagagaccatttaagggaagaattgcatttgagttgaattttgaaaaaattgagataggcttttgcccggcatgggtaaaagtgggaaacagtccagaagaaagatgtgagcaaaggctcagggacaggagaacttgggatgtgttctgagaacagtgagtaatccaaaatggattgatacatatatcacatagtatagctatttctatatacttatgtcagaaacaagggaattaagggaatcacaaggctctgctttgcctgtatcaaggaaggcttcctagagaagccattaatttcactctgtctgttatgcatgctttacaccaaggtgatgtgattagttttcttctttggtttcttctttctgaattcatcaggtggtcacacccactgggccacagaaagcaccagtggattttcactagtgattcctgtgattaaaaaacgtttttgaccagcacgtaatttgtgccagatttgtaagctagagtgaattctatttttgtccagttcaacctggccataggctgctgtaacctggcccaagagcttaatgtaatactttcaagaagattaaaaatccaacaatcccttgaaacattggttgctaacctttgaaagagtagtcactgcacctgagtagccttaggaaatgaataggaggtctgagaaaaagaaaaaaaagaagagtggtaccatttgcttaaaatccctagggccttatagggtaaacctatttctaaatttaagttgctaagaccttgaacctggggttgtttggggatattttggaaagtaaggaatattattgactttccatcaggaaggaaagaactcagttgtttttgatattactaagaaagagagagttttgcatttatttgtttgcatggacggtctacctaccgtgtggccttgttcatgacatggcggacctccctctctggggtcagtgtgaatagccaggctgcagctgtagctagagacaatggccagcactgttgggccttgccccttaagccccgaaggttaatttcctagtatttagtggcattgaacccgccaaagaaaatgctgtttcatctgggggaagataatttctgcatgtgtatttttttcatgaagaataaagaagagatatttttggaagaacataacttaacctgttggccttggctaggaaagctaaaaaagcaaggggtcagtactcttacaagtatcatgtcttaaacgtcagccaaccagtaattatttagatgccatcagaggggaagtcccatcccattgttattttttctctagactgtgagatgctttaaaaaaacctctctgtagggaaatgatctttaaaaaacaaacaaacaaaaagcctgagaatttagtgctgcatttgttgagaagtaagggccctggaaacggaggagtttttgttgttgttgttttggtgactgctttgccactctgcatgttacaaagggcaaattcttggccactgtttagggttcccaaaaaattccaagatgtccagttaaattagaattttagataaacaacaatttttgtatgagtacatctaaaatattgtactgggacctactcatacttcaaaattattcattgtttacctgaaatttaaatttaactgagccttgtatttctttttgccaaatctgcagtgctttgttacttcaataaaaaaactgtccaaggagcctgggagcttttatgattattgaaaatcactgtcaattttaaacctaaacaaaacaatagataaagctttgaaaatagaatcaagtccagtcataccaagtgaaaggagtcctttctcatttttttatcttcttgtagccagctctggagatccaattctattgggaatggctcacctaggtctactgtagctcagagttataccttgtagatcacctggatgcttctgtgttccagctttaactcagaggatcaggtcagaatggaggctccctttgaaatctaaagtgcttagcttctttagggtagctccacaccctttttaattcttctgtaaaatgtctatctagcctagagaagtggagtctcactagacatggttctgagaataatagctatcatttactgagtgcctaatatgtgccagtgccttacctgcattacctgcctgagttcatactgccttctaacaaccctatgagacagatactgttatctccattttacagatgaggaaataaagacccagagaggtttagtaactttctgcaggtcacagagccattgaaaggcagaagtgggataagcattcaaatcaatctgactccaaaaccccttcagtaaccattgtactactgcatgtgatgcccttagattctccacttttcctctccctccccaagcccccagtttggcttgatattggaatcatccctttctctccttgttctttactggctggaattaatagagtactttcggtctgaaactggccttaaagaatctttgtccgtgtgtatcacactgcaatgcaatagacgcagaaatctgggcactagaagatgttaactttggatgcctcctgttttatatgcatatgattaaaccaatggggaaagaaagccctgaaactttattacaacatttttgtagtattaaatttgacatattaaaatgtgttatcattttaatatctttaaagagcctgaggagactctcaagccttagactgtaaatagctaacagctttgagatgagcttacataggagtcaaatgattgttccaagatggctgttctaattctgcagagctaccgtagtattcagcctactgcctgccaaaggcaaggggccttgcccctctcttcctcctccctgctttcctctttgttaagaagtaacaaaaatatactgcccaacacccactttcttttagaaccaacacatattccttctggctcactccctctataaaatgatttgtcagcattttgatctcattaaataaaaagttttacttggtcaaactgggaaagtttatgaagttagcccttccatcccatcatctgctgtggccacagttgttgactgtgaaatagctctgtgggtgtggtctaccaagtatcccaatagcatttcttacactgtgggctatggacccaaaggtctggaagagttgttttcatagggtcacactagaacactggctctttctggttaaaagcttccctagcctttctcctccaactcttaacacatctctcatgtttctttcccccctgcagaagtatagaaacctcctcttttcttttcctctgcactctcctcatctgtctccaagtccccattgtgccatgtttctcctacttcctgtttcctttaaccactaacttctcacgatttttaaaatcaagcctatccaattctaaaaggaaattgaaaccctgcccaccaaaaaagtaaaactagggggaaaaagccatagtaggaggtataatgttatgatcttctctcttagccctacacatctgtaaaaagtaatcttgctccgtactgcaagactagggcagcccagtcgcccactccccttttattctccctcctcacattcccctgtccttttctaacccaccttcccacttagggtctaatttagccaatttatacactcgccaagcttgcaaaggttttggttctctccttttgggtgtggaatgctggtgccacaggggctttcagaaacaatttagtaagtgatagacttggaagagttcaaaagcagctctgggaagacatcactgatgagtctctgctcttagcattttgttgcctcttagaggcttagcaaatagcagcatttgatccataatctgctctttcttggtacccagagaggcagcacaagggtagaccttgagcaagttacttaaactctgagcttctgttgccctttctgtaaaaaaaggcaaaataatcattctgacctcacattgttgctatgaggattcagttagttaatttttaaattttttaaaattaatgtgtttatttttttgagacagggtcttgctctgtcatccctgctggagtacagtgctgcgatcatggctcactgcagcctcaatttcccaggccccaattatcctcccacttcagcctcctgagtagctgggaccacagctactcccacttcagcctcctgagtagctgggaccacacctggctaatttttgtatttttggtagaggtggagtttcaccatgttgcccaggctggtctcaaactcctgagctcaggggatctacctgcctcagcctccaaaagtgctgggattacagccatagccactgcgcccaacacaatgacttaatatttataatacacttagaacagtgcttagcatgtagtaagcactagattaaataaatgtataaaatgaaggaagaaataataatagtgtttttcttttaattcatgcatgaagaactatgttcgacttctgtatggtatcttgaaggggtccaaaataaatctgactggcagtttgaaggcctataagagagcatattacataatttcactcaaggattttgacaattagtccagcttgatggatctcttctcacctgtattttggccaaactgaccaattatttcccattccaactgccatccaaatttccttccccatcccttccacatgtttcagttgcttttgctgcctttgcttcatattgactgtcaggatgtatggccctgtaatactaggtttttatttaaaaagcctttctctcattcataagcttcttttgaggagtgaggcctgcatttctgatggttgtgtatcattcccatgccttgtgcataagtggtactctatccatgtgttttgattggctgatttgagcttttgcagattaggaaatagttggcctagagctaagtggcacctgagagaatcttcccctccaggcctcacagatgcactctgtggaaaggccattgtctccttgctttgtgttggactattaggaacctaaaagctaggacaggcctgggtagagatagccacctttaagttaggggaatgttggggagtctactgggatttgactgtgaggtgaaaggagggctgcctacaagcagaaagcttaaggcattggctttgtgtaattaccaggaatgcttttagctagcaccttgaacggttggttaaaaagggacagttagatgtttgttagatgtgtggtgttaataaccttgaccagtagattcgtgactatgagaatttcaaaaggcgaagcaagaacacacacagagggaaaacatctcttgtttctaggggcagccttcccagcagcactcagcccagagctgtttttcccccaaggagaacacagggacaaaataaatatgccttcctgacccaaagacaggagcgcccagggagaccatgggatctgggagtgagagcagattgtagggaggaagtatccaggatgagactggtattagctacaggctggacagttagtcggtggcagctaggtactgctgctagtggctgagggcagggtttcttagagacctgaagatgtgagcattcatttatttgttccttcatcattcagcaaacctttactcagtgcttattatgtactggatactgggctgagcccccacttgtgacctcactgggcattgagtctgaggccttggcagctaagggtggtgttccttagggaactgggaggccatccagacaggaggcacagtacaaacaagaaagaactaggggccaggtatggtgtctcaggcctgtaatcctaacactttgagaggccaaggcaggtggatcacttgaggccaggagttcaaaaccagcctgatcaaaatggtgaaaccccatctctactagaaatagaaaaacagttagctgggtgtggtggcaggcacctgtaatcccaactactccggaagctgaggcaggagaatcgcatgaacctgggaggcggaggttacagtgagctgagatcgtgccactgcactccagcctgaatgacagagtgagactcctggggaagcccagccctgcatcagagaaagtgatgcactgatgcttcacacacagagaatggaagcgggagtggaggcatttttctggagttcaagcttcaccttcaagcatgatattcagattccatgagagcatgcagaaagagcccagcggacctgttgaacagggcataccattgtgagtccttagaagctaaaagacagccaagaacagtaggaaagaagctgagaataaaagctaagacaggtacctccaatctctaaaaagttaaacctcttagaggattataaataaagccacactcacaggtgtacatgctataatttattttataagtgcctggcatattaataaatggtatgtagtttacttacagtgctgtttgggtggttctcaagtaatctcttgttttacattctaaagtccactcagtgttagaatggaccatttgagcccaagtagattcaacaaaccatctatacccaacccgcacatctgggcagggatgacacttgatgagccatccaggcctcatctcatagactctattcatcccctgctgtcatgggcaccaaaacattttatagtaaattgcacagtagtttgtctttcccaataaactgtatgcttcttgagggtaggtaccctatctctttatctctgacacctggcacacagcccagcacatgacaagatcaagaaccaggactggccggggctcagtctgcacgtgctctggctttcaagtggcatcttctaatgatctgaaagacctctctagaacttttttccttttatgttatgtaaataatatacttaagatagaaacttttgtgtttcatgttgtatattaatgttgaatataaagtttttttctagagtgtgactattttttcacctagttccttcaaattttcatccctaccattagtttttcaaagtctctggattcctgttgaagtatccttttctctggaggtttatatcacctcctaggctgcttttgacttatctactcatgctttacttcggtagtgctgatgctcacccccagttattcctcacctgtaccatgtggtattattaatgcaaatgaggctttacccggctatcccctcccctagcatttatgcattcttcagggaaaactctgttgtatatgtctctgagtctcccacagcaactaacacagtgccttacactccattagctcctcaacgagtatgttttaataaattccattagtggagtgaggtagttaggagcaggtatgagctcaggcctttgagtgggacaacctgggtctaatgctgcctccttcactaactacttttatgatcttgagcagtctgctaatcctccttgtgtccaacttcttaatgtttaaaatgaggataatagtagtacctacctaataaggattaagtgagttaagatatgtttttgagggttaaatgcattaaaatatgtaaaacacttagcacaatgcctggcctgtagtgagagctatcattatcaacaaccaccatcataggtacccattatcagaagttgggggtttggataaagaaattaagtttctctaggttatatttttgtgaagtctgaactggaatgaacttcttcagattcctcatagagtacttcatgccccgcccttttattgcacagggactatatctgcttcagtatgatgtagaacatcttgattaagagtatttttttatctttcgtccttgacttatcttttggtgtgtaggtatattgtttcatcacattctcattttttttttttttaaaaagagttgttccatttcccctttttctgtctactgctttctccttctacgcttaggccaagagtatattacacttggaggcatctagttagcgtggtgcttcccaaacctttccaggacccaaaataggctaaataccacaccaagggagacatcgatgatgttctattaagaacagtgaaagggaacccaggcataaatatacactcagtatacacaactgtcaccacccatagcactgaccatcctattgtaccttagaacttaacactgtaatttatctgagtgttttttaatggctctctactaagtgtcaagctctgtgctaggtctggggaatggaaaaatggtaagacatggttcttgctgttgaggtgcttagttgtaacaatttattttcatcttttattaaatactaattgaataatgttgttattctttttcttttctttttttttttttttttttgagacggagtttcacgcttgtttcccaggctggagtgcaatggtgcaatctcggctcactgcaaccttcgcctcccaggttcaagcaattctcctgtctcagcctcccgagtagctggtattacaggcatgcaccaccacacccggctaatgttgtatttttaatagagacggagtttctccatgttggtcaggctggtcttgaactcctgacctcaggtgatccacctgcctcggcctcccagagtgctaggattacaggcatgagccaccaagcccggccaatgttattattctttaagtaaaacatgtttccccaagtaaacttactgtgtgtttagtaccatcctggaccctcttactcacagtgctatttgccccactactacccagtaaaaagaaagggtgacaggttgtaaggacatgtaggggtttgaggaaagttgggcttgtgtcaatgtaataaaagccaagtagttcttcttccagcccagtctgtatctatgactagatcatgaacagagaactaaaggcttttgattataaacctccttatgcctaggcttggcccacactcaactctaatacaaatagtagtaaatgttaggagtagacataaaatgagcacaggttgccactagaactttttctataacctaattacatttttttcaacctaaaatattacatattgtgtcagccaggatgccatcaggaaagagatggtgcactttagtattccgaggctaattacagtggggctccattagtgcccctagattgagaaggtgagggaacaggctggtttctggaagcaaggagatagagggggctgtgtggaaaagactgcctagcaggatctgagaccttccatcaagaggcacagccagtccatagcccaacatcactctgctccttcaaatctcctaccggtgcaccccagtggcccaacccaggagagtcctgttgatgtgacacacacaggccaggtcccagggcagagagcaggtgaagaatgattgtgagtaaatctagaggggcacacaggaagatatccagcaaacatgtttcacacttgattttagaggtaagggtgtgtatcttaattttatctgttttagaaaactaaaattttaatagatttaaagtatttctgccatagttcttaaactatcaatctgatgatgtcagatatttttctcagtgtcattagtttgacctcccgccacatttttttggtggagaggggtgagggattgtgtataaatttcctccagagcacacagagaataaaaatgctattcttcagtttgtttttttttgttgtttttttttttttaacaaagagttgttccatttcccctttttctgtctactgctttctccttctacgcttaggccaagagtatattacgcttggaggcatctagctagtgtggtgcttcccaaacctttctcagccaaagactcctctgggaatccaactaaatttcctggttcccttttgcttttaatatcaatgaccatattacccaatgaggttatttttatttcttacaaatatttttataattaacttaagattcaacaaggagccaaaggtaaacagactgtaattatttcaagttctaaccattatgagtagatattaatcttcgagaaggtattattaaaaaaaagtatataatattcataaattaaagtcaacttataagtacaaaggaatatctgtgactataaaaggaaaaataaactggaatttaaaatttaatcactgtgccttagtaaacacgatcctggtacatttcagcacagtatttgtgtttcagaataggattttgtcttctagttattcactaatacgtatttattttactatcattcagcaagaaaccctttaaatcactgtcaaaaggtaggtgatttactggaacagctaacctacctctgcctagagtcccataggcactcacttccctatggaaccctctgtcccttcttcccttcctatatacctcaggtacctttatgcagccttgttctattgccactctgcctgttttactaagctgccctaaagtcactgcaaaattttgatcagaacattactgaaccaggacacaaagaaatgctcattacaggctttaaatatatgctttttcttagatctatgggaacaatttctctaattcttaggttttgctccctgaaattacacagaaagtactgtatcttcttaaccctttctccacccctcctttcatttcaacccaacaaacttttctcctgtgcattgctaggcagtgcttccattgtccttaagtgtttaaggtcttgtgctggtaatgagccagtagtcacaaagctagccagtggatttgttcttcaagcctttagtgattccatactccatataatggactataccatttgtggattccttgacagccatgaggagacactgagggagctatgaatagaagaaccctgtgttctcccctgtccagctcccctggcttttggaaacagaacttcaatttttcttctccatctatgtggttcacatggaactgaccccatcctccaactctagaggttgtctctgaacttgggtcagaccaaacgagtttcagtgcttggtttagaaatgaatatgtaaccgaagctgagcatgtgagaatccaaccataagaatttggccgagccttctggggaagaggagcctctgtaagctagggtcactaaattggtacagtgaaagcctgtagccaccactttggagaagcctgcctaagactaacaacacactgcaaggaagagctgaaagatggagagagactggttctcatcatcatttgaccactcaagttcagctaccttggtcatacaacccgttaaatctatccccagccctaccagttattttgtatattatgtcactttttatttttatttatgtatatattttttgagacagggtcttttgctgttgcccaggctggagtgcagtggcatgatcatagcacactataacttcacactcctaggctcaagtgatcctcccaccttagcttcccaagtagctaagacaagaggtgtatgccaccacatccagctaattttttattttttgtagagatggggtctcactatgttgcccaatctggtctcaaactcctggcctcaagccatcctcctgccttagcctcccaaagtgctggaattacaggcatgagctaccacacccaggcttattatgtcaatttgaatgtgcactctgtcacttataacccaaactcctgagtcaaataccagcacatctgagaattcaacaacttctgggatccacagccccatggaggctacaagctactaaaaagataggaatgtcagcttcagctaagaattccagaaatctacagaaggtacctttccttttctttggttccagagagcatgataatatacatacagaattctggaaacttgggaccaataatagggtgtattaccaactgtgtgtggtatctgtaattaaatattgctaaaaccctgtagaggctggtttttacctttaaaaagatcatcttaaataatctgaggatttttattttaaataagttaatgttaaaaatattttttgggccgggcccggtggctcacgcctataatcccagcactttgggaggccgaggcaggtggatcacgaggtcaggagatcgagaccatcctgaccaacatggtgaaaccccgtctctactaaaagtacgaaaaaatgggctgggcatggcgctgcacacctgtagtcccagctactcgggaggctgaggcaggagaaaggcatgaacccaggaggtggagtgtgcagtgagccgagatcgtgccacagcactccagcctgggcaacagaccgagactctgtctcaaaaaaaaaaaaaaaaaaattgatagcatgaaaatttgaagtaaagagtcaattatgttaaagaaaaaaacactccaaaatctaacatgatgctaggctacgttaacaagagcctggcattaaaaactgagtcaccatattcagcattaataagatactagcaaagctctcattcagctgccatgcctaggttgtgcttctgcatgttcagaggatgtggaaagcaattgaaatgattaaaagcatggaaaatcacatctctgaagagcgatgaaagtaggctatttaactaaaagaaaagaagattgaaggaagaaaataaatggtgtttaagtatagaaagagttcttataaagaaaaaggtgtccagatgtttcccccttccactgagtatattaagagaaaattgccttagacatttcatttttacaaaggaaggattttttcaagcaaataggattcttgtactgggtgtgacattggactagatgacctttaagatttttcttcactaagattctatgattaccagattgaggatgtacttatcaaaagagtgtggaaccacttgctgtatgtcttaaaaggtaagatgaggaaacactggctggtttgccttaggtgtcattctgcccaggagttacttccaacattcataacatgcctttgaagaagcaaatattgtatatagacaaacagcatatcagaaaaaaatcaaaacaaaaacaaaggaatactagcattaaagtaataataaaatataggatttttattttctactctttcagtatagccattagcaattcacagttagtttcttcattaactagataagataagtgaggcaaatcatgggacagtttagtattggtgacagtgtgtttggaggggtagaattaagtgttccatatggaatcaggagcatttaatgtcagctctagtatgtatgtggcatatttcctactgcaacttaattggcataattttggatccagagaatacaaaccaagactcagaaaactatattttacttttaaaatatagttttaaaaacaattctaggtttatacatggaaaagctattctaaagaacaatagctggccgggcgcggtggctcacgcctgtaatcccagcactttggaaggccaaggcgggtagatcatgaggtcaggagttcaagaccagcctggctaacagggtgaaaccccgtctctactaaaaatacaaaaattagctgggcatggtggcgcgtgcctataatcctagctactcgggaggctgaggcaggagaattgcttgaaccaggacctgggaggcagaggttgcaatgagccaagatcatgccactgcactccagcctgggctacagaacgagactctgtctcaaaaaaaaaaaaaaaaaagcaatggtgttggcattattgtggtttcaatggatctatacttatttaaaacttaaagtttaaaaaaaaaaaagtccatatgttgctccacatctttctgtactagttgggccattttgttgagttctactatgtggcaagtcaggatgttttgtgtaagtacaagctcctgtgactatagttttcatgcatccacatatctactaattagctccacaactgggttctgcaatttcctgggccacatcgctgagacagattccgcatgttctgcaccagcagtcatttccccttcatggagcccacatagtcacttaaaagtaatttatccaggagggtttccagcttttaagtgagtctgctaataacagaggttgtctgacttcacaatcaattatcctgcatagattcaagtgataatttctatatttgtagttttcaagttgcagggaaaaactgggaagggagaagaatatcaattctgcaaactggttattgaaagtattgggggggtttgctgaatatggtgattttgatggaaaggaatcttaacaataccccattcatatgcattttccaattgaattatggaagaaaaattaacttagaaaaccaagcaagcaagcaaacaaaaagccccaaacaacagcagcaaaacccgacttccaaaaagagttcacattataggcttacttttaaaaactgatctagaaacaagaagctggtttctaagtttatttccacacttgccctctgaaccctgtcttgttgaaagattcaggatatcagattctctcccataatttcctttcaacagaacttactgtattacccacccatcccccaaatataaatggctaaaacagctggctctttcagtcttggtgtatacacacaaacacaaatgagatacacacacacacacatgtatattatacatctctgcatatataaacacatactttggtcatttatttttttaacagaataaaggtaattaatcaaaatacaattcattttaatagttgaggcttgacagagatcattatttcaagaaaagccaaggagaataagctccctttcatagtattgttttctttctaaacctctatagggtgcatggctcttaactactgagaaagtttgggacagcaccatggagcagcctcctggcctacatgttaaaagatctaaattctcttggggaaggagcttataactatgtattcactcaccccacagaagagaagattttgcatctgttttatttctaattctaggctgtctctagttagccatagggcaaaaaaaccaaaactatttccccctctttccctgaagaaaaaaactgaagtgcagagagagaaataaatatctttttcttattccagttcaatttagtttcatttgttcttttctttaatattttgtgagcggagaagaaacatctttaaatcatctcatctatgtgaaacctgtttttagagagtccagactttttctccttcattctgtgattccatcagtgatgctgaaatgactgatttataattctccttcctactgactgggaaatagaggtgtatcatagtggagggaccaggaaaatggataggtagatgaaagagaaccagaggaccctgtccacaacccacccacccagctgaggactgttagctggtccatgaatagaatgctctcaccctttctgcctctgcatatactgctctgctacagagccactcagcagagtggtgtccccttgacccagttggggccatcccgggactcctgtaacctaggaccttctagccttaatcatatcatcatatgtaaagaatgcctacaaatcaataaagaaaaatagaaaaatagacgagggatataaactggtgatttttagaagaaacctgggcattcaactttacaagtcattaaggaaataaaaattaatacaaaaatgagatcccactcttgccatcagtttggcaaaacaaaacaaaaaccctaaatgttggtgagcatataagaaaacaggaactcaaactgctaatggaagacgaaactggtaaagccactttgaagaactatctggcagcctctagtctgatgtgaacaggcacaagcactgcagcccagcagctacacttctagctgtgagccttagagatacctttgcttcacaggtaaaattatgtacaacaaaggctatatttatttttatgttttaaaaaggccagaaggatgaacaccaattttttctttttaaaattaatagataacattgtacgttataatcatatacaacatgatgttttaaagtacacatacattgtagaatggttaaatctagctaattaaacaaatgtattgatcacatagttaccattttgtggtaagagcatataacatccactctctacatttttcaagaatgtaatatatttttaaccatagacaccttgctctttcataggtgtcttgaaatttattcctcttgtctcattgcaattgtgtatcctttgaccaacatcttcccatccccctctccaccacaccccagcctctggtaaccaccattctactgtctacttctatgtaatcaacttttttggattccacaaagaagtgaaatcatgtggtattttgttttctgtgcccggcttatttcatttaacataatgtcttccaggttcatctatattgtcacaaatggtggaatctcattcttttttatggctgaatagtagagtcaaccctagaaaaatgcagggatgaggggtgctaaccctcacacagtcagaaatccacaaataccttttggcttctccaaaactttattagcctactgttgattggaagccttactgataacataaacagtcaacacatactttgtatattatatataatatatactgtattcttacagtaagtaagctagagaaaagaaaatgttattaagaaaatcataaggaagagaaaacatatttaccattcattaaatgaaagtggatctttgtaaaattcttcacccatatcgtctacacattgagtaggctgaagaacaggaggagctggtcttgctgtctcagaggtggcagaggtagaagaggtggaggaatgtagtgggagataggagagacaggttggagtagctttattgaaaaaatccatatgtaagtggaccttgcagttcaaacctgtgttgttcaagcatcagctgtgttccattatgcatataggccacattttttttatccattcatctgttgatggacctttaagttgattccatatcttggccattgtgaatagtgcttccataacatggtagcacagataacctctccaaattcttggtagtggttgtcactggaggaagaaatgtgattggcatactttacttgatatatcatgtgatatataggatagatatatattttatgatatataggatagatatatcatatattttatgatatataggatagatatatattttatgatatataggatagatatattttatgatatatatacacacacatatataagtattatatatgttttatatatatatatataaaaaaacaaacaagaactgaagaaaatatagaaaatatgttggctgggcgcagtggctcatgcctgtaatctcagcactttgtggggccgaggcaggcagatcacttgagatcaggagtttgagaccagcctggccaacatagtcaaaccacatctctactaaaaatacaaaaattagctgggcatggtggcgggtgcttgtaattccagctactccggaagctgaagcaggagtatcgcttgaacccaggaggtggaggttgtagtgagccgagatcgcaccactgcactccagcctgggtgacagagtgagaccctgtgtcaaaaaaaaaaaaaaaaagaaaagaaaaaagaaacagaaaatatgttatatttttctctgtacttttctgcatttacatttttctcaaaattaaaaaagcagatagccactctttcagttgattagtacaatcagcatactttagtctcttagtaattttctgatttgcatctttgcagtccctaaacagtctttcctctatgatactaacaggtttcactgcaaccagctcaccttcctggatctggttttaagcttggtgaaggcagtgctgataaggtctgacaatgtggggagtggtagaagaggcttggaatcttttactgtttttcatagcatttcagagagttggaaaatagcttcagggatcatctaatagaatttatttatttaaatgaagaaattgtggtcttgagagccttgttcagatgcacctggctaattaaaggtagagttagaatctgtaactactgattttctagtaacaagagcagaaagttctacagagccttccccatggacaatcaggcacccaccatgggtttggtattttggaaatagccattaggttagcaatactttaagggactagaaggagaggttaaaagtctctgtggtcactacattcaagaagcagtatagcataaaggctgagagaaggtttatcagaagccatacttgcattggtgtatatcttggctctgccacttccagctgttttatcttggataagttacttaacctgtctgtgccacagtttctttaattgtaaaagtaacaataataatagtacctatttcagaggttattcggagagttaaaagagttaataatatgtgagaatgatgtctgatatataatgtattcaacaaatgttagctattattatttcatttggagaacaagctattaaggaaactgaatgtttaattatggttctgccatcttttgctttaaaccacttatctctcaaaactgtcctatcttcctttgtatttaacttggatgagtcttggttttacaataaagaaagcagaattcaaaaaggtaagatcatttactttcctagaatgatgtcatacatctgtggtaatgattatatttccttttcattatatttcactcaacacttattcatccctattggtatacatgggggctacccatgggagatgtgaagcaatctagttgacaaaagaaataaaggactgagtccctgggggtgttactgtccaatacatagattgctattttgatgcgctctgatcaattacaagcaaattcttcaagtttttaaacaaattacactccaaattcctacattttgacaaaagtgctttgaaccttaatataaaatgatgatagaattctacttgccaccaatgcatctattaaacagtgtaggtttctaggacccaaatcagattttctttctttgtatcagtttcttgaaactaatgctataatcctgatgtggcttttagacaccaacccattcaatggtggagaattcattcccagggtttgaaagacagctaaccatttctttgtttgtccccagtgcttttaaccaaataatgtagttcttaaaagatgcatttatataaggtagaatactctacatttcctttttatggttgtttaaaaatgtttttaacaaacattacagtaatttttctcatctacctcagaaaagttccatgttctaactgagatgaattcctttgtcaaactagtaagagggtgatttcatttgtagtttacttactaatttattccataatttgagtgttaatcttgctgtcagatgaatataatcaacttttggactcaatttcttcctgtggaggggagaatttctgtgtaccaaattcccacataattgcctcttttgcacacacccacatcttatttttgttggtgcctatcctagcccatcgcaacctgtaattgtccagctaaataatttttaaaagatttgatgctttcaggtaccaaaatgattcagatttaaagctgcagtggatagtttattgatacatgaattaaacctgaaataccccctcagaaccttaaatctcttttcaggacagatgtctaaagttgaccacagtttttctgtgtgaaagtagatgctaaaattagccattgtagcatgcagctttgtggaagtggctgtactcttgcatcctgtggttctttcttccctattggcatggttattttgatctgaaatgtcctttttcctttgctgtctagctttctgctgtctacctattgccattccatgggccataattctcaggtggaggtttttaaaattttcccttgcctaggctatatcccagaccagctgaatcagaatccctggggacagagcaggggtatttgagtttttaaaacctcttcaggacattctgatgctcaacctgaattaagaaccacttgcttattgcctaggttagaaatttttatttgttttgttttgttttgtttgacaggatctcactctgtcccccaggctggagtgcagtgacatgatcacagctcactgcagcctcgacctccttggctcaggcaatcctcccacctcagcctccttagtagctgggactacaggcctgtgccaccacactcagcaaattttttagtttttgtgttttgttttgttttgttttaagagatggggtctcactatattgcccaggctggtcttgaactcctgggttcaagcaatcctcctgcctcacactccgaaagtgctgggattatagtcatgagccaccgtgccaggcccaaaaatcttttatttgtaaataactgaaacccaaactatcttaacagcaacaaaacaatttgtcataaggaatcacgagactctcacataacccaacagcatgaaatacaactggacttcataagagaccagagcctggaacaggagcatttacaaggacccaggcaactagtccctgttgcccaggtgtagctctctgtctgcctggctcccttcaggggcttgtggattcagatctctgcttctctctgtacatctgctttctttcttttctctttctcagctagccactttcgctgctgctgagcacatggccaaacatggtgcatcctcattacccacatttgtacgtccttagttcgacttcccagcccagggagactagcatcaatgaatctaaattcctgagagaggatctgatcagtctggcacaggtgatatgtctgcccttaatccaaccagacaacatggcttaaacatggctgccaagggcccacccatgtgtaggttaagtttggaggctatttagctatctcaaagtgtatctttatgcttgccatattttttttcttttttgaaggaaattttgtattattttaattatttttatggacagaaaactcaacagtgtacatttaacccagttcagtggcaaagttctttaacctttgccttttcgagcttgataatgtgagctacagacttgagacccaggacattgcctccccagtgacagtggatctcatcgtatctgtcgtagttggtcctgatagcttccaccagcttagccaaagctcctttgtcttccgagttaacctttgtgaagacaacagtggtgcaggtcttcctgtggactagatgtcccagtcttgccttccccttgataatgcagtaagggaccccctttttacaacatggggcaggcaggcagaagacagccagctcgatgggatcgacatcgtgtgcagtcatcaccagctgagctttcttgttctccaccaaggtggtgaccatgttaactcctgctcgaaggacaggtggtctcttagtggggatgtcccctttgctggtagctttcttcttggcctgggccaacagcctctgcttcttctcttgctttgtctctggcctgtacttgtgggccagcttaagcagctgagtagctgtttggtggtccagggcctgggtgaactggttaatggcaggaggcacttacatccacttacagaggatggctctctgccgctgcaacctgatatagtggggccatttcacaaagcgggtgaggtctctttggggctggatatcctgtccaatgccaaaattcttaagccttttctcaaacaggggattcaccacttccttggcctcctgcttctttatgacagcaggagctggagccattttttctccttggctttctttcctttcagcatcttgggtggcgggaggagagacttatggttgccatatttttcatctagcattataccaaataactttgtttctaatttcagttttattgatgatattttcgcctttaaagaaggtgaaaagcaacaattttcatatatcaggggtgatttaacgttacagatgccactaagatgaacattgaatgtactgttctctctctaagcctagttcttcctcttataaatagggatcagtctaaatgttgagaaaattagagaattgggaaatctgcctctcctaagtagtaaaagttgaaaagtagtacagtaagatagcaatctaatagcacagtcattttctacaatgtatataattttaatcatcacaataaagaatgtttaaagaaattgaggtagtttaatcataggcagtgctgagatgtgaccatataatgatcttttagagagaaggctgctactttttctttgtctacacaagggttaaaaaaagaagaaatgtttttaggaggaatgtaacatagtgcctggcacatggttagtattcaatagtattttactaatagtgtttacttagaaatatttatcagaaataacttcaaggtgtctttggaccgatacaatgagttaccaaggaaagtaaatacatctttccttcttcctttttttaccattaaaggaaaccaaaatacttcaccctcaaatatacttctttgacatatttgagatggctattcagagaacctgcagacaggaatagccctgtaaaactaccttttgtgggggagatttacatctgtagagaaaatctacattgctgaaataaacagccagcctttctgtgctgtgacttgtctggatctaggacagatgggctcctgggagagagagactgagagtttgacacctctggggatctaatagaaacttactcttttggagggctgctacctgtgaggtttcatctgcattacaagactgcctttgctagccatgcttttcttctcttccacccataactggtcttgccagactctaagcctctattccttctgtaacctcaggatgaaaacttcaactatctgaccctttctttgagtttttcttattttttataactcctgtgcacatgcgtgcatattactatttttgtatgccttttttcctattaacctgccttttgtcagttgattttcagtaaacactcagaggttgaaggggaggttttccctaggctcctataccatcttgcatatttgggatatcccaagacatccatgacgcttggctctctaggacattgaaatctggttagggaagtaaaatatgaaagcaatggagaacagtctgcctttggcactcagagatctctagatgttttcacttgtcccatttcatccttataggttaagaagcagggaaatagagttcattacaatttcaaattataattttgctgatattttccccttcagggaaggtgagaagcaagaattttcacatatcaaaggtgattttaccttgaagatgccactaagatgagctgggcagagagaatgttaaggcaaagcacaatgttaatgactaaattagaactgaaaatgaatttaatctctttaaagaacaagaatcaaggtaactgtatttcagtaatgtgtaatgcaaaaaatgcatgatgaataaaatacatcatagaaatatgaagggttgagttatatgcaagtatattataggaaaaattagttgatctgatactgtatcagagtagcttcatcattaaatgacactgtgtcatttatggaatcattggcaattcctagaacatctattacagcactaaagtggtcagggttttcataaagttttgtggaagtctgaaccttattttcttaggtcaaagacatggtagaagcaatttataagtaatgttttattaataaagtgatttctaagtttatgataaatacaagtgacagatccagtggaatttattggctaatgtaattgcgaaggctaagaagtggatctaatgggtttccaacaatgtcatcatcgtttctgctgtaattccatctctctgctctgctttcctcctgttggtttcattcgcagcaggttttgccatatgggaggagcaatgcagcagtctctggtctgtatcacttaggatctcataaggcataaggtcttttttctctccaactttgtcagtacgttcaaaaagagtcctattggcccattagatcttttgtctaccccagtggcaggaagacagggccccagaggtaggggtggagcagttctccaaaggaaaggaaggtttcagttattagaaaaggggtggaaagaatatatgtccaccaatatatcacacaactgcatatagtgcactttcacatcctgtggcaaacaaaaatctttcactaatggaaaggaaatgatggcttgacatattgtgtatagtgtaagaaaaaaaaaatccagatgcttttttcatattcactctaattccctaggttacaactaattagtacttcctgtttgctccccatataatttgcttaccccttgactctatcacatgtttatcttccttctagaggcctatcttacagaaataggatgtgaacacttgaagacagaactttgtcttttatctctttatttccagtgcctagtccaatccttggaacacagaagccacttgatgcttactgagtggaattaaattctatcctatctactgcttatattaggaaagaaaaaaaatttactagtcaagggcttcagggggaaagtctttgttctctaggaggaaggattttccctaagtcactcttggcctttctgcttcttcactgttcctccttagggaaagtggaatggcttatctaactggtgagtctgagataaggaagcacttcgcacattcagatattgtcctccaccagccatagagggacgggacagggggccctgcctaacccagttttggggaagctcactgttgctatgtacccatgccttctctctctctctttctctctctctccctctctctctctgtctctctctttctaatgaagagtttagctttggagttaatgagcaaaagatttccttaccataaagtgaagcccatcaagtgaaagcaagtagaaaggcgcagaaaggtttatccttgtcaccatgtggaaggacacttggggagcagatcatttggtaactgttggtacttgtggcctctacatcttgtaaattcatacatgtccacgtttgacctaattgtagacttttttgaaattttcagttttaggtgaataccaatgagtacccagagttttctgtctttgttgtcctctggatgttggtcccaaatccactcaggcaacaaatcctggagttacctgctccttatctttaaagtatatgtagcccttggtctccatttctgctgcctttttttttttgcttatttttaaatttaaaattgacaaatacagttgtatgtatttatgggcacaatgtaatgttataattaataaatataatatgggataattaaataaaactaattaagatatccatcgctccaaatacttaccagttttgtggtaagcacatttgaaatttactctcttaacaattttcaaatgtacagtacataattattcactatactcgccacacaatttgagctccttatatattttggatattaaaccctaatcagatgtatgccttgaaaatattttctctcaatccaaaggttgtcgcttcatgcagttgttttccttgcggtacaggggctttttattttgatataatcccatttttctatttttgcttttgttgcatgaacttttagggtcaggtctaaaatatcattgcccagaataatgttgtgtaattttccccctatctcttttgacagcctacaatcagatatatgagcaaagaaatgatttaaagttggaacttacatttaaaagggaagcagagtgtaaaattttggataatttgcagcctggctatgtggccagagaaataaaaagcatttttaggagaggaatacaagcaggctgaggaacaaccacttgcttagaaagattagcgtgactaaaagggagccaagtgctaatttccaagacaatggggaaaaggcatatcagagatcttggagacagactctgctatcagacccagagcattatgaggaaataatggtttcagggaccaggcctgggccattgccctgctcaggcttgagacactgctgtctgcatgtgggctgcttcagctccatctccagctccagctcaaagggccccaagtacagcttgggctgctggctctggagggcacaagctgtaagctttagtggctttcatgtggtattaagtctgcaggtgcacagagtgcaaaagtgaaggaaacttcgcagattcccctagatttcagaggatgtattggaaatcctgggtgcccaggcagtagcctgctgcagaggtggagcccttacagagaacctctactagagcagtgtggagaggaaatgtggagttgaagccccccacatagagtcctcaccagggcactgccttgtggagtgatgggaagagggccaccacccgccacgtcccagaatggtagagccatgggcagcttgtatcctgagcttggaaaagctgcagacactcaactccaacccatgagagcagtcatggggtctgcatcctgcaaagccacagggacagcgctgcccatgcaccagtgtgccctggatgtgggacatggagtcaaagatgattattttggagctttaagatttaatgactgccgccgagcgtagtggctcacgcctgtaatcccagcactttgggaggctgaggtgggtggatcacgaggtcaggagatcaagaccatcctggctaacacagtgaaaccccgtctctactaaaagtacaaaaaattagcacggcgtggtggtgggcgcctgtagtcccagctactcgggaagctgaggcaggagaatggcgtgaacctgggaggcggagcttgcagtgagcaaagatcacgccactgcactccagcctgggcgacagagcgagactccgtctcaaaaataaataaataaatagcctgggtgcggtggctcacgcctgtaatcccagcactttaggaggccaaggcaggcagatcacgaggtcaggagttcgagaccagtctggccaacatgatgaaacccagtctctactaaaaatacaaaaaactagccaggcatggtggcgggtgcctgtagtcccagctactcgggaggctgaggcaggagaatggcgtgaacccaggaggcggagcttgcagtgagccgagatcatgccactgcactccagcctgggcaacagtgtaagactcaatctcaaaaaaaaaaaaaaaaaaaaacaacatttaatgactgcccttctgggtttcagacctgcatgggaactgtagcccctttcttttggccagtttttccctttggaatgggaatatttacccaatgcccatattaccattgtatctcggaaataaataacttgtttttgatcttacaggctcataggtggaaggaactcatctccagatgaaactttggacttcagacttgggacttttgattgagttggaattggaacaaattaagacttgggagaactattgagaaaggatgattatattttgcaatgtgagaaggacatgagatttggggagctagaggcataatgatatagtttagatatttgtcccctccaaatctcatgttaaaatccccagtgttggaggtggggcttggtggaaggtgttctgattatgggggcagatccttcatgaatggcttagtccatccatttggtgatgaatgagttcttgctctggtggttaacatgaaatgtggttatttaaagagtgtggcacctccccccactcttgttcctactctcaacttgtgacatgctagcttcccttcacctgccaccatgactataagcttcctgaggccttaccagaagctgagcagatgccagcaccatgatttctgtagagcctgcagagctgtgagccaattaagctcagcgtcaggtgtttctttctttttttttttttttgagacagagtattgctctgttgcccaggctggagtgcctggaggcatgatctcagctcactgcaacctccacctcctgggttcaagagcgactctcatgcttcagccacccaaggagctgggattacaggagtgtgctaccacgcccagctaatttttgtattttagtggagatggggtttcaccatgttggccaggctggcctcgaactcctgacctcaagtgattcacccaccttggcctccaaaagtgcatgaggcgtgagccactgtgcctgggcagttatttgtttatagtgatgcaagaacagactaacacaaatgggttcagaatgcagttgtggaaaaggtgtataatttaatagttccctcaaacctcacagaagaatttcagaaagatcctatatttgtttttgaatgcatgcagagaatagattaaaatataaatatcttgatgttttttatattacatatttatatcccatctttttccaaaacagatttaaagtggtttcatctttgacatggtaatctaacccatgacattcaaaagccacaaggacagaaaaagaattttctaagactgcctgaagcgcaacttcatttgatatgatttcctagcctagaatataatcaggaaggcactgatttctttctgttactgttgtttttaagcaaaaaagatcccattcctcctcttctatttctttgcatggtgaatagcttcgctagttacccagccactaaacaacaacctgggaatcaacttcctctctattctgttgccccttcccccaaacaaccactcgatcatcaagatttcttcctcgatttcatgttcagctctacatccagggtctaaattcacaccttggatttctgctgcctgaactaatccagcagtcgcactctgtagcccttcagtccctcttctgtagcatgtccaaagtgttctttctagcagaacaatgtgattgtgttactcttgtacttgaaatccctcaatgtctttttcactgtctctgggatttattccagactccctagcatacatacagggacctcaaggtctggcagctgctcagttctccagccgtatatctctgaatggtttctctctcggcctcatttctccatcacccctcctcccagtaaacacatacactagaaccattgtgaatttctcagagtacttcttatggtctaggatagtttacatttttgggtcccttttgctgctcctctgcctataatttatcccttcccctcttgccttccctctaccccccaaggctggctcagcttttaagactcaatcgaagtgccaccacctctctgaagcctttttcacacttcacccttaggaagaatgaagcatcttcttcctcttcttcccttccatgtctataatcctcaacacattttttttttcatgaattgtctgcaacactgtttgctttcgctagactgaaagatcttagggacaaagtccaagttatgctccttctgctgtctctaatatctagcatcattcctgacactttagcagtatttcataaatgtttattgactaaatgcatatttacctatgcatgaaagagtaacagtttcagagtttttgttagctgcattcctttacttcctatcagtttggggaagtagatttagtatccacaaaatgattgggggtcccctgtactgcaaagatttgactttaagaagtaggtggctgggtacgatagctcatgcttataatcccaacatattgggaggccaaggcagaaggatcgcttaagcccaggagtttgagaccagcctgagcgacgtagtagggacccattccgtatgaaaaaccatatatattagccaggcatggtggcgtgtgcctcccaaattggctgaagcaggaggattgcttgagcctgggaggtcaaggctgtagtgagccatgattgtgccactgcacgccagcctggatgacagagcgagaccctgtctcaaaataataataataaataaagaaacaggcccgtgaacagcatcagcagtttcagctactaatactagcagtctttgttcctcttagagtgcagagagctgctggtcacttttgatctttattaaaacacccatacacagtaagattgcttgggaatccaaggcagaatatatctgtgtggtttgagagaggactttaaagtgttagagagtctaatcttagagcacactaaaaagagagtagatacactaccccaggacagagatgaaataatgaatttgctgaatattccatgtgggccctgaacatcaacagggcaagagagaagtcaagaaatgaaaagtgctggtaaggtcagcaagtacctatcttggcacccaatggtaccaagtgaccattgcatggaccatgctctgggagggcatgagaaaaattaagggcaaaggacattccctcaaagagtttaccagtttaaagctttaatgtcactgaaactaatatgtcttctgtgacaagctttgatgataaatgtagactaagttttttaaaatcatataaaaatttaaaatactttgcaaagcacaaacaattttcttaggcctgccttggtagcaagaacagtttgtaatgactaaaaagtgaagaatctatggtatattcatggtctaaatcagatattgcaagctggtgccctctggactggagtcatacgatattttcaaattcaggaaattttaaataaaaattaagatttcttacttgtgatttccttgtgctctcaggttaaaatggtttatgcaagacttgatggtttgaaataaaattggctaaatggattctagtataaatgcaaaggatatttaactcacttgggagctcataggcataatgcatatgtttgtttaaaaacaaaagaagcaattgaagattaacattgactttgtctcgcctggcgcggtggctcacgcctgtaatcccagcactttgggaggccgaggtgggcggatcatgaggtcaggagattgagaccatcctggctaacagggtgaaaccccgtctctactaaaatacaaaaaaattaaccaggcatggtggggggcgcctgtagtcccagctgctcaggaggctgaggcaggagaatggcatgaacccgggaggcagagctttcagtgagccaagatcctgccactgcactccagcctgggcgatactgactttgtctcatagtttagatctgggataaacaaaccttttctgtaaagggccagaatattttaggcctttatttattttaggttttgcaggtcctataatctctgttgcagctaaacagctctgccactgtagtgtgaagtcaccatagatgatacctggacaaatgagcatggctgtgttcaataaaactttgtttatgaacactgaaatttgaaatttatataatttctacatgtcacaaaattttttttgtctttttttcagctatttaaaactgtaataactattctgagctcatgggccatataaaaacaagagatggacctcatttgacatataggccaaatggacattggctgagtgtcattgtaaaatcttggtcttaggctttttagacctgattagcctaaaaggaacaaactagaatgttctgttctctttacagggcaaaggaattctcctttccctactttttattttttattttttcattttttttggatggagtcttactctgtcacccaggctggagtgcagtggcaccatcttggctcactgcaacctccgcctcccaggttcaagcaattcttctgcctcaccctctctagaagctgggattgcaggttcgtgcccgacgcccagctaatttctgtattttcagtagagatgggttttcaccatgttggccaggctggtctcgaactccagacctcaggtgatccacccacctcggcctcccaaagtgctgggattacaggcatgagccaccatgcctggcttccctacttttttatatccatggggagcttggttgatatcctgcttgaacatggaagacccaagttgctcaccctgtgttttccaaagccttaaaggctagtctacatttcagacagcccaggtgatgagggagccttgtgttttctgtgaggaaccttatcccttaagcatctatatcccagtcatacttatgcatggaaaggctaagtaaaatctattaatatcctagctagaaagaaaactataaaattacacatagatgcaagcttgtgtgtattctgcagttcaaagtgtagtcagcaaaaaaagcatacacgctatcgcactgggaggaaatcggtgtctttgaaatcaaataccctgccattggcatatccaggcttgaaactcagctgcagcttttagcttccaccacatgtttacattggaaatctctctgtgcacatatagagtttgttctcttatgaaatcatgtctctagggaaggataatttaaagccatttccgtttgttatgtctgagctgaactagactattagggcttgttaacgctggataaacttgagccctataactgccttcatctgcagattatagaatctgtccaacaaattgcattctgatgttttcagaatgatggctaagcaagcaagggccttttaatttatattctatcaccatggttgtcaggaatcacagttttgactttcatgcttacttggtatagcagcgatgatatgactcttgaatggaccaaatccagaagtaattgagacactaaactgcatctgcatgttactatagcagagtgagcaaaggctgacagtcagaaaattgctggtgaagcatctttcttcagagtgcctcccttccccgagtcttagcataaatcagtgttaggtccactgaaatatcgtgtgtggtctgcatttagaaattttatttgaaaatgagacagatggataaatgaaaacaagttttctttaggctagtgttaagtaaatagaattaagtgaagatagacagttttcctgatttagtggaggggagatggtggttgccccaggatatctaactccctctgcctctattcatcaaatccactgaacacatttgccttcagtttggcttaatatcattcaccattttagatagtgggatactggaaggtagaaattacatctgtttgacttcttttgtgaaccagtgtagcagaactaccagtacaacttaagtaaaatcacaaataggatggcaccaggcaatagtgtgactatccaacatggcatcccctagctgggaaaggaatcctttcttcatggctctggccttattttcagtagctccactgaattcacttcttttcaataaacttgtagaaggtactgccctacgccctgaggttggggacagtggcagtggtaggatacagagacaagtaagacatagaccctgcccaaaaggtgactgtatacataaagcaccctaatccagaccagactcaaagaatgctagaaatgaagggcagacataggacagtggcattttgagtaagaaatagggtttcaactggtgggagaaagaagaacctgctagactaagggaacagcatgaactaaagaccagaagtagaaaagtactactttttgtaccaaaagtagaaaagaccaaaagtgttgagggagaatgggaataattcctctctctctctttccttttttccctttattctttattcaataattatttgatgaatgtttatggtaaaccgaacagacacagctcctgcccacacaaagcttacagtctagaggaggaacaaccaggaatcaaagaagcccaaagtaaataacaaattacagccctgacccttacctcaaaggagaggggtacattgactaagagagcacattacaggagagtggaacatactttacaagcctttactggagagatgtcctgccacctgaagagagaggaggcattgattagaggagagcgctctatggagaggagtcagcgtggacactgagactgcaagagtgagggaatgtgcgggattagaccacagtcagggagcagaacacagtggggtttttggtctttattctaagagcaaagaaaagctattgacctgtttctagcaaaagatggggtaaggtaatgagatttgctagttggaaagatcccactagctgcagtgtagagaatgaattagatgggtgaagagggacccctgccaggaggcagatgcaattgtccatgggggatattctggtttctttgcactggagtaatgaggatggggatgaaaagaagggaatatgtttaagagctgataatgagcttggccttggcaacactgagtttgatgcacctttgagatactaaggagacataccaggaagatataggtgtactggagctcactgaagaggtctgggctggagataaacaattgagtcatctccttataggtgataattgagccataaaagtggataaataaatataagttgaatgaatgatagaattaatgaatagatggtattgggtgaggaaagagcacagagtaacgagggcttaaacaacgttgtggtgctgtatttctgtaactattacttatcagttgtgagactggacaaagtgattttcctctggccaggtctgatgcctcctatggacacattctgaaagccagcaggaacctagaaagtgaccaggccacccccttgcccacatagaaacatgtctgctaactcttccaccttaccaataggtggattccaagagttcacataaaaggtggttgtttggattgtagaagtctcttcccaaaagaaactcctattttcctagggagatgccaccatagaccctaattaaccaaggtcctttctgtgagacattatgttcaataggaccttgaggtgttacaaactatttcctcacagatgcctgggcataggcctggactcttccccagaatcctcccatcccacttgccaggcactgagaaacaggactttccacttgtttgtcactggcaaggacttcatggcttcagagagggagctccaggggtttctgggacacttaccagtataaattccctgaggttcttctaagtctgtgcttgaattcattcattcattcccttcttatcttttctgaggaccccaagaattggcctgcctgtgtcctttgcttttacttgcagcaggtgggggtctggcacggtcgggggaagggttttgatgggaaaagtgaggctggtactatttttcctcccatgtttagcctatagagtatagtcataaaacttttcctcaatgtttcagtcctgaagcaagcgcacagctcattggaagtttctaaggatttttattattagcaatgtcagaaagcaagttgaaagcaaaacagccccctctgggcctcttccctagcctttccttattttgtgttgctttcctcacacccaggaggaacacatatcccaattcctgaggacagtcctgatttgcaactggcatcgtggcacaactgccaatagtaccacctttaaaaagtttagacactgaattatggtcatgctacttaaccccataaagaaaaataaagtaatgcattgggggtaatagtggatttacaaaagactacaataatctcgatctgcattttagcgagaggatatgagccacagagtgatttctttggtattttgtcccaacagctggactgggcctctatgtgtgtaggtgagggatggggtacagagaggaggacttgtgggaagtgctggaatatcagggctagaatattgccacagaaatgtgtctattttttctcctgtctctttctcagtaaccagatctaccttggaagactcagactggcactttggcaaggtgagatgaaaaatcagggctgaggaaggtgcatttgcaggcactgtggggtccacagcagagaggataaaaacgtggaggcagaggtgcatccgagtcataatagcacagagccgggcgttggggttggggcctgagccattgttgtctggctgtcgcagcagggggaaaggaggacagaagtgtcaatgtttcgtttagaatttttctaaaaagttgccactttgggtgaagggctcagtaagaccttcccctccacactccacataactatgcttctattagaagtattctgagcagttcaggccttccacgtggtggaactgtgtggggtaccctcaagcccatgggtctctaggggttgtgcctaagtcacatgtatacgttccacctgtgatgttaggcaagcaagcatatgatcctttctcatcaccacttccatgaaacaaagacattttagaactgttgacgatagcaatgttttctcgacaaagagattacttgtaaagtagtaaagaacattagaaaaaggagctatagtcatatggtcactgttctttgtggtgctatataggtggtgtgtatattataagaacttttgtgtcttccaataatgttttttggtttttggttttttggtttttttttttttttttttgagatggagtctcgctctgttgccagtctggagtgcaagggcacgatttcggctcacggcaaccttcacctcccaggttcaagcgattttcctgcctcagcctccagagtagctgggactacaggcacacaccaccacgcccagctaatttttactgttagtagagacgaggtttcaccatgttagccaggatggtctcgatcccttgacctcgtgatctacccacctcagcctcccaaagtgttgggattacaggcgtgagccaccgcgcctggccccaataatgttttaaacgagtaaaatgaagtttgtcacttctgcatgcttacaagcttaaacatcaaaagaattggccaggtgtggtggctcacacctgtaatcccagaactttaggagacgaagttgggaggatcacttgagtctgggagtccaagaccagcctgggcaacaaagcaaaatctgtctctacaaaagatttattttttaattttttttttttaattattaagaatccaaagagtttatacatttaggtgggaaaggtaacccttgggaagccctgggctagcctctcggcttgctcatgattcaagtagcaaaaagaagtagtggactcaggacagaattttgacgtgggagccccatttcaagctctgaggtctgaaatgccaagtttaagcctcttggcctcattgtgactcgatttccctttctgtgaaatgagaagataatcccagtattagggtactatccgagtaccttcaggctttttaggaagaactctagtgagtaagctctctggctgtagaggggaccgtgatgcacagtaaaaagaaccccatcttgtcactggagggatataggcagccgcccaatgggagctcccatactgtagagatggcactcttgctttggtgggactagtacagatgtattttttatgtcccatttcttatgttgcctattttttggagacatatttgtttgttaactctttgagtttcataaagaaaacattaatacaaattttattgagtggtaggttagctccaatatcctcaaaatagattgagcattttagaattcaccttaatgttacctggaatgcaaaaagatttgcctaaaacgtttagctcctcattttgttactggcttcattctgattttggaaacaacagaaagtaaagtggaactggggttttgggtctattagattctccaatttaatctcgcccatctattcctgatattaataaactctttctaatatcagttggccatggttgtcattctggtaaatacctccctggaaccggactgaataaaattcatgagacttgctggtcacagctggagattggttcagtggtttgggtttttttttctaccaaagtgaaaatagaattattgttattattgttttctagttttaaaatgactaaaagtacaaaggaaaaatggaaaagtcaatttaaatcctactgctgagagaaataacattttggtgagcaactctccagatcactctcagaatgtgcatattatacttccatgtgccattgttagaaaacaagagtgtactttctcattgtggacaactctatgtccataaataatgacaccattaattatagtgacagtatataatattccattaaacagctgtgctattatccatttatgcatttcccaattattattcatttaggtttttttatattgcttactatcatttaaaaattgcagtaaacattcttttacatccagatttccaaatttgtctaattatctcccaggttatatagccatatcttgaggatattgtagacatggttccagaccattgcaataaagtaaatattgcaataaagtgaaatacattttttggtttcccagtgcatataaaagttatgttggccgggcgcggtggctcacgcctgtaatcccagcactttgggaggccgaggtgggcggatcacaaggtcaggagatcgagactatcctggctaacagggtgaaaccccgtctctactaaataaatacaaaaaaattagccgggtgcagtggcgggcgcctgtggtcccagctactccggaggctgaggcgggagaatggcgtgaacccaggaggcggagcttgcagtgagccgaggttgtgtcactgcaccccaacctgggcgacagagcgagactccgtctcaaaaaaaaaaaaaaaaaaaaagttatgtttacactctactctattaaaagtgcaatagtattatattttttaaaaacaatatagattacctaaatttaaaatacttaattgctaaaaaaaaaaatgctagggatcatcggagccttcagtgagttataatcttgctggtgaagggtcttgccttagtgttgaaggttgctgactgttcagggggtggttgctgaaggttggagtggctgtagcaatttcttaaaaaatgacaataggccgggcgcggtggctcacgcctgtaatcccagcactttgggaggccgaggcgggcggatcacgaggtcaggagatcgagaccatcccggctaaaacggtgaaaccccgtctctactaaaaatacaaaaaaaattagccgggcgcggtggcgggcgcctgtagtcccagctacttgggaggctgaggcaggagaatggcatgaacccgggaggcggagcttgcagtgagccgagatcccgccactgcactccagcctgggcgacagagcgagactccgtctcaaaaaaaaaaaaaaaaaaaaatgacaataatgaagtttgccttatggattgactcttatgaaagattgctctgtagcatgtcatgctgtttgataacattttatccacggtagaacttctttcaaaattggagtcaatcctttcaaaccctgccactgctttgtcaactaagtttctgtgatattctaaatcccttgttgtcatttcaacattgttcatagcatcctcaccagtagattccatctcaagagaccactttctttgcttatccaaaagaagcaactcctcatcatgttttgtcatgagattgcagcaattcagtcacatattcgggctccatttctaattctaattctcttgctatttccgccacatctgcagtaacttcttccaatgaagtcttgaacccctcaaagtcattcatgaaggttagaatcttattccaagctcctattaaggatggtattttgacctcctcctatgaatcacgaatcttctgaatggcatctagaatgctgaatcctttctagaagattttcaacttactttgcccagatccataagaggaatcactatctatggcagctatagccttacaaattgtatttcttaaataataagtcttaaaagtcaaaattactccttgatccatgggccgcagcaggcatgaaaacaacattaaccttgtacatcttcatcagagctcttcagtgaccagctacattgtcagtgagtagtactattttgaaagagatctctttttttctgagcagtaagtctcaatggtgggcttaaaatattcagtaaaccatgctacaaacagatgtgctgccatccattccttgttgttccatttctagagcacagacagccattttcaacatgccttcctcactaagcttaatcatttctagctttaaagtgagagatatgtgactcttcctttcacttgaacacttagaggccattgtagggttaattggcctaatttcaatgttcttggcctaatttcaatgttgtcgtgtctcaggaaatagagaggcctgagaagaggaaaagatggggaagggctggttgttggaaagtcagaatacacacatttattaagtttgctgtcttacagaggtgtggttgatggtgcccaaaacaattacaagagtaacataaaagatcactgatcatagatcaccataacagatataattataatgaaaaagtctgaaatagtgcgagaatgaccaaaacatgacacagacatgaagcaagcacatgctgttggaaaaagggtgttgaaagacttgtcaacgcgcttgccacaaacgttcaatttgtagaaaaacatagcatctgcaaagtgcaatacagcaacacacaataaagctagacatgcctgtactcctgaagtgatgttgatgatcgatgggtccgaggcatgtttcagtttttgtatgtattgcaaaactacctgtcaggaatgtatcagtttgcatgaccatcagcagtgtttgtgaattattggtcccccacactattgcctacactgcagctaattttttttctcaatctttgtgagtctcttgagtgaaacaatatcttactgtcatttatgtttgctttactttgattactagtgagatgaagcatctttttgtatgtttattgcccacttgtatagtatttctcctattatgaaacagaataggtcctgtccaaaaactctaggaaggttatggtctggttggtccatggaatgtaggatctggactgtaaattattcttcagtcagatcgtgtgatataaaagcctatatcacacaatgtgtgatggtaaagaaattattaaaaattatttgaaaaatattttaagaatagcttgttttatgattatatcatggagtttgagtatccttaacaaaggaagaaattcaccatgcttattggagacatgtaatcctagagaaggtgggactgggccatgcccctctgctgcagtaccagcacagaatgacagaattgttggaaacctctcctaattcataccaccccacagaggagcagctgccacagtggagcacaccccacctgcttggaggtgccataggccagcctctctgagttttatgatgcatctgaaatggagttttactgcatcctcccacgaccttacgaaaaaccacgggggaggaaagaaaaacagaacccaccaagaggagcaagcagacctgtccgagggtggggaattggctactccataaggcagcaggagagtaaactacaaaagacataaagcacaccttgctttaatcccttccatccgcccagagcccccagaaagctcataaagtctccctttctgggtgattggattcctttagctcaggggcaagtagggcatttttttggttttgttttggaagagggctgggtaaaggagaatggtaatcactggggttggaggagggagaatgaaaacgggggcaatcactggggttgggggagtcccttctcttcttgcttcgaggtagtgagtgggaaacgcaaacagctgctgcctgaaatcacagcgcgtgggtactgggcagccagaccagatcagcagccattaagcagggcccacagttcctatggccgttacctctctcagaagccaggcagagctgtgagttctttcaccttttgagggctcctcttggctacctcaaaggaatcatttggaatgctgctggcaaaaacgttgctgaaagttgtgtgttgtaggggggcagtgttttttctctctctaaaaagagtggtggtggttctttgccaggatttagaagccagaactgtctgtcctttttgtttgaaatagagactttagagactagtcttttcgtttactgaaagaaggagaaagaaaggaaaaaaaatttgtctactttgcctttggtctgggtactttccacttgtttgcttttaacctttctcagtgtttgcagggtgcagggaaacggccttgtcagcctgggctgggctccttaagtcttgaacaacaaacacttaaaataatcaaaatgttatatttggcagttaaaagaagaatctcctaaaactatgtctagtcttatttgtttctgaactcctggtagaggcggggagaccatgttctccattctgtggcctagccactcttccgggccttctcttgttcctcttcactccctcttccccagatgtactcctagactgagctgcttcccagctcagagcccaccacgtgcctctgcagcttctgtgcctttgcagatgccgctccctctcctggaatgccttctccccacccttccctggctgaagtcctcctggccataaaaggctaccctaagtgcactgagcttccttgctaggcacatcttatcatcgttatttctgtaattcttcctttcattggctgacatccatgacatcagggcccaaccttaggtggctagcacaatgcctgtggcagtagtggcagcagtagtcttcgtgttaccagcagcagcagtaatgactcttactgggcatgtgccatgtactaggtctttttcatactcatctctaatcctcccaacaactctacatcgtatatgatattgtctcctttttagagatgaggaaattgggacttaggtggggtggaaagatgtgatacctttcctcactcatcatgagggtcacagctgacacccctttaacaaaagacaggttgatgataaaagcataacaaatgtatttcatcaaagttttacatgacaagggagtcttcagaaatgtagacccaaaggcccagggaagatggtctgtttctatgctttggtctgaggaagaatgggcagctgtgtagaaatgtgattggacaaaaaagggtctgatctaatgatgacagactgagggggtagacagagcaaggcctgtctgttcagattcttcttggcctccctatagcattccttcctccaggtagggggtaggacccctctgaaatgaagggttttagggagaagggagagaatgacctttctaggttttatggattgctttgggagagaggggttctagattctatgacctgtcttgaggaagaggaattctggtttctgtgattccctttaggggagatgggagacaaggagggcaggagaaggtcagagaaagactttgcttctgaggcagctctgaggctacccaatatcctttagttcagagtactcagcctgccaaagcaccatagtttgggatactgttttctgcgccctggcacttacaagttaagcaactcacccagggtcatagagctaacaaatggttggaccaaagttagaagccaggtcttactcatttccaccctgtttcaaggactctgattagatgctcaataagtacctactgagtgaatgagcggccttgaaattgttttctgaggctggggaactcttgccaggaatttcaagagccactgcttttacacttggccacttaactttgctccctagagctttagtttctcttcttctacacccaatatcatcatgtctactgttttcttcctgagtcatatcctctcattatgttttagctatggggggtaaggatggagaaaggggagagtctcctggtgcttgtttcatgtatcttattcccttgacctggtccttgttcccttgaagtcttttgtttgtctgtttgtttttgagacagggtctcactctgtcacccaggctggagtatggcggcacgatctcagctcactgcaacctccatgtcccaggttcgagagattcttctgcctcagcctcccgagtagctgggattacaggcacctgccaccacattcagctaatttttgtatttttagtagagatagggttttaccatgttagccaggctggtctcaaactcctgacctcaagcgatcctcccacctcagcctcccaaagtgctaggattacaggcatgaaccactgcacctggccccttgaagtctttatagtcgccccaaagaaattaggctaaacttaagaagtcactgcttctgtagatctaaggtggctgaatatcggccacagcatacagttcaaactaatgcagtgtatctattaaaggttataagaagatacctacaaacttccctcatgggattgttgtgagaattaaatacatataatacatataaaggacctctagtgcctaacacattgtgagctctcaaaaaaatataaatgttagctcttgtcattatttttgttaatccttgactggggtactaaaattcctaaaagagagtaagccaagaaaaatatgttaattattacagcaactaatatttattactatgcatcaagccatttttgtaaggatttttcatatattaattcattattaactaattttcatagcaatctgatgatgtaagtgttagccccattttacagataagaaggtgaggacagagaggcgaagttggggagcttgggatcaagtttctggttctagaacctacgttctttcataaccatcactgctctgaaaaagagtaagcaccagacctgaaagaaacataacagaggccgggcgcagtggctcacacctgtaatcccaacactttgggaggccaaggtgggcggatcacgagatcaggagatcgagaccatcctggctaacagggtgaaaccccgtctctactaaaaatacaaaaaattagccgggcatggtggtgggcgcctgtagtcccagctactcaggaggctgaggcaagagaattgcttgaacccaggaggcagaggttgcagtgagctgagattgtgccgctgcactccagcctgggtgacagagtgagattccgtctcaaaaaaaaaattaaaaaaaaaaagaaacgaacagaaatgttgttagctccttctcacttttatctctagtttgaatgagtgtgtttgtgaaaggcaaatgcctctggggttcttgcacagtcctgggcaccactgggaggagagagggcaacctagagacatttgtgttcctggtaaacaactgaaaataggcggagcctttgtgcactgaacccagctactttcaaatcgcagtacttcccaattgcaaacttggtgcaaaaaaacctacattgccacagttgagactttcatgaggaaagattttgggtacaagatagtttttcataccgctttgcttacccctgagactgcaaagtaccatgtctccttgttttatagaagccaaaacaaattctatcgataaacagaatttttgaaactctggtattttcagaaatttgtactgtgcataaagtaatggtttggtgaattaacataggtgattaaacaataaagtgatgcatacccatttccatagaaaatatatgcatatataaaaggaattttacagataaactgtatgatatatctgttaatatatcatgttttattttcagtgtttttgtgtattctcagtgtccgccagtatggagacaggctcatctccaggtgtgcaggctctgagtgaagggggcctcctcattggagtgtgcaggggcctcctcattggagtgtgcagggctctcctgcggcggcgcccactctgtgtccttcttccctgtttttgtttgccaccttgtggttaacatagctctgtggctcaaggaggagggttgggccggtatcatctctgaaggtaaaatgcatacatgcgatgctgtaacacagtctttctcccggcggggagtgggagtgtgtgtgcacacgcgtgtgtgggtgcagtgaaggtggagttgcccacttagtgagactcagagtctaccctcaaccactgtgcttctgtgtgctcccgtgtaggctggaagtcgtatcagccgctccattgcacagagattgcagagaaggggccacatcggtcagtgttagcgtccacaggaggaagttgtgtggtgggaaggccgcttctggctggactgcaggcttgtttgcccacacgcgccccagtgagagcgaggcctccacgggcttccttctccagtgcggggagtgtgtggcgaaggaagtatctgctgctgagctcagctttgcttcgccatgttccttcccgatccgctcatcctaaccctctctccttccgcctccatcctccctgctctccgattgccccagtgtgtgtgtccccttccccagccacccctctgatccctgactaccctcttctccctccctccctctgcgcccactcctcatcgcgggcctcaggggagccctgtctccactcaagacacccgtgaaacagagggagacactagcagtcagcgggcactttgtggggagggccaatttagaggacagattgaccagggcgagcagcaggatatctagaaagacgctttgcttctaaggagcgggagcctaatcccgttacaggctggagggagactcctggggccggcaagcctccttcccgctgtgcctggagggatatcattggaggaccgccgggcgcggtggagggctccactcgccagcagccccctcccccagccccttccactctcttttcttttgcagtgacacatactgcagtgcctctgaggtcatttgtttcccacagcctcacagggcgctgtggcaacaagggggacaatgatctctcacaggaatgatgggaggccttgttttgccttaaataagccccttcaagggagcagtaaggtctgttgtgtgtgtggtttgttttttcagaaaatcctcttgcacgtagttccagtgtgaagtactctggcaacttcaattgaagacataaagaatcttatgtgtgtgtgtgagggtttaattttatttttattgctgctttgagaccaggattgtgttttcccttctgccagttacccttttcccgctcaagctccctggacctccgcattctttcaatagttttagggcaggaattggcaggtgttaggggcagagagacgcccatgtctgggtgctggcttctgactgcccttagctttggtgagggagtgaaggttagcgtggcaggaatgtagtgctcctacacatttctcatcctatcctgggtctgaggaaagcacagggcactgggtggctagggctgggattcacaacaaagtgacagtggaggctgagggagacgtactttatgggccacctcggaatagatcatcagctttaacgccagagcttcagaggcatgtgcagaaagaaaaaggcctgtaagtagaataaagaggaggcaggttctgtgtctgattcggctgtccggtgaggaaagatgtgaagtgatctctacccacaccctggtaacaccactggaagacaaagaactgtcctgtttgtcttactgctctgtcctatgttttaaagtcttcaagctgctgaaggcagtcccacctcagagcttacatgcgtaaacattattatctgtaaaggcttcctatttgatgaatcatggtgtatcatacaatctagatatttcatctggagaaactgagatgaggcagattaaagtcttttccaaaaccacatgaggaattaatttcaaagcttgagattaaaacctacatcttgtagtttcagattattaacttaccagtgtgatctacaagttctttctccatgttctaaaaaacaaattttttaaggcaatcaagacattttcattctctcatgtgagcagtatgtatcagaaaaattcatctgtataaactgtatggcagtctaaattatatttttaacctgtcttttctttttttactttttataaatcatatcttccactgtttacaaattttgttatgtctttcacatatcagactcaaaaacagttggctttatgattgggccactagaagaaatataatattttttcacttaccttttcatttcctgacttttttttagtgataatctgaatatatttgtgaaatatttaggcaggaaggtgagttttccagatgtttctgttgattattgcaaacacagagcaattcaaagactagtgtcgctttttgataaattaaaaatactttttttgataactagttattcttgactttaataaacattcctaagattaattcttcccttaacaactttagtgtaattttaatttttcacaaatcctgaagtgggagtactggaattttggagaaataaattaacatgttgccttatttctctggaccatctgttaatgcttattctcaactaaagtactgttcatcagcttcaagtaacaaacataccatagacaaatagcctatgtctgtgacggtgataagacattggccaaatcatcctctctctgaccatgacaaaagtgtaccagtcgtagctaaagcaagactgaatctatttggtattcattgtaaaggaaacaacaacaacaaaaataactaataaaggtctgagacaagatgatggatggcaaaagaaccccctatggtcataaataagctaactttggaaatgtttgacttaaggaagtacagactatgcttagtctgcctcgtgtccctggactaaagcagccttgaaggctcatctgaacatttccccaggggtttcttgcctattgacaaatcccaccacatcttccagatgcacagaagaaagttccgttaaatccaaaatggtaaccaaaaatgttgaatagcaagaaactggcaggggtggctttgggaactggtaaataaataacaggcttgttgtcccacaccctagtttaatgctctcaagaggttcttatgttgctcgcattagtgggcatgtaaatgaaacccctgttggccttggcagatattggcctcttccgtgaccttgtttgactgaaacaaaaagtcattggtggaacaaaaattcagagctctgaacttggttgaaagaaaagggcaattctctgaattgggtaattggatcaccctcccaagtgccctagggcttatatcaaacatataagaaggggattaataacttcagtgtataaatgagcttcaggcagcttccaactgtaacatttcactctcaggagctttaggacataacagatttttttcagagcattttgaagtgctctttataaaatgcaggaagggactacagactactgtggaatctttgtaattgtacatggtccagtctgacaggcaggcaacccgaaagcctcttcaaaatggccacttaataaaactgttcatgaaatataccattttgggactgaaagatgatgacagtgatatgttttcaaactgtacttgatattcccttccttagtcataattttatgatctagactaaattacatgtatcattgagtgtgaggattccaagacttgagacagacttacgtatttatgtgtgagttgtaagggaccattggaaaagctgagaattttaaaattcatttatattaattaatttgttcactcagtatttattcaatgcctactatatatcagacttgaggatataaaaaagtataaagtagagcaaggctgacagacatttgaaaggcaggttcatgaggattgaaggaacatgtgggaagggagccattacttcttaggagtggggaaaatccagaggagactagaggagataacgagagatgagtcgacagcacaggaaaataaagaagagtattccaggcggaggatacaacacttgaaatagttacccagaaaagctggcctggtgattaatcggcccagataaaagaggtaggctaacactgttattcgtcttttaaaggagaaggatcaagaagcagttctgttgggtcctgaggaagtgggattattagtgatggacacaaagtgctggtgtcacagctgtggtagaaaaagggaaacaagagaaagcttctgaaaaaaatgttttgacaactatttttatggctgtggacatcctgagacctctgacaatcacatagaaaagagagcccatagggaacattttagaattgattcttatcttaatagctatctttttggcctgtctggttgccaaaaagaattagcagaattctgctgtttatgtattgctgaatcagtttacaggtgatgttttattactagggaaatattgctaaagctaggtagaggtgcttctaagaactaaagcaccagaaacctaattgggaaaggaattaactttagtcatgtacatattttcatttttctcctttaatttttatattaacagaaaccctgtgaggcaggtgttttacctacattttcacaaatgagcacacagcctcgaacaagttaattcctcagaatcccacagccagtgcatgctaaggcccaagtccccttcatcctccattctcccaccggtcatagctaagtcttcaagctaatgttcacctgccagagtaaaggcagaatatttgaattctcttgtatttgttttagtttagttattgactatgtttttcttcctataaagtaaatatgtttcattctttctgcacaggttttcctataatgcctgggtgcttctagctagagagggcaaattgatttcatcttccattcaactccagaaggtctatagtggccgcttggactgctgtaatggagttgctcagcagccgctcccatatgctctatgatggggcagtggtggtacaagtgctgcatccctgctaccgaggctgctgctttagtatctttacttcactcttaaagtggggaatgagagaaattgtctaaagtcctaacacaagacagccatacctacttcccaaagtagtaaacactctgctgctgcatgtagaatgaaatagagcagtgaaattataaaggagatttgcagtctaataattgggagggaaaatgaagtataaggctaaatgaagtagactacaaacacctgaagcatgactacaaaatcaagttgacattttgtggctcattttcagggtagctgccggaatctggttatggtcgttgtttttattttttagggttttcccccatctgtgtacagtgagatagcaaccacaaaaaaactaacagccttcctgagtctcttggctgtagagtacccagctcttttccctgaagcttgccctgaagaggcctggtgatacatccctcttgggagatgtgacatggttccatattgacattacccactgggctcattgcttgagtctcaaggttgtttatgtatttgatgtttcatttaaaaataaaagttacttacggcaaaaatagcctagtgccagtgggtttggctattgtaaaatttagaaacccatttaggaaaccaccatcaggatcttgttggtgctgtatcagcttgggcatattgcccttcagcacaccggctcttgcacagattgcgtccactgagttgaattatggaaaccttccgtgagaaaatgagagcactcaggaagtagtattggtgatccacaaagcattgctgtgtcctctaaggttctttcctggtctcataccatggtttcttcctgggtaaaaagtgaaactggggttctgcctttctcaagggaaaacgtgtttgctgcttggctttggaattttggggcaactcagtcagtgacatttctctttcacaaactcctcctgttctttcaaataggtgccatatctttcactttccctatcgatacttcatatgttatgcctggctgctaggtttcattccagagcctcttgtgtttaagtaatgaatggactaatcataatgactagctcagtacaggttgctgagttggagaccatggcctagtcatttctctgatcacacagaagtcatttctggacaaaaagtgctacatactatatatctatatctgtctatatatttttttcttgatctttcttctattttgtgctgcaaaaacaaacttcgaggggatgattctctcacaggatatggaaatggccttggacaatgtccagggttagtggcacagctgctgtttcctgcaagggacatctcaaatccagaagggaaaaaagacaaagttaaatatatagcaggaggataatgactgaacctattaacccatttatgcctagtgttccattagtggaacactaagcttgtgggagttatttatatcctcatgcttaagctcatcaccaaggtctgatttttcacataaaaattttgcaacctctggcataaatgggttaacaagaaggaagggatttgcctgttacaagatctgtctgtaatcacatatagccattggcagaaattacagtttacatttagaagacatgtttaaaactctttaccaaagggcaactgatccaataataatgatagcaacaacaataacatctatttatggcacctaataattttaaagttcctttgtgtacgtagttttatattcacaacaacctagtaaggcctgtaagttgactggagagggctagggtatgtaaaactaggtaaagaacttggattttatcctaagcataatgcaaagttttcagccagggatggacatgacttgactgacagtttaggaagattacttggcctgctctgtaggagtatagactgtaagggggccacatgaaagccaggagacaagtcagcaaacataacactaatccaggagagagattatggtggctcagactggggggtgtggtataggggatggcaagtggtcagattcaagataaatatgaagacattccttacaaaatctgcaaacagattgaatgtgaagtgtattttaaaaaatgaagaattggccgggcgcagtggctcatgcctgtaatcccagcactttgggaggctgaggcgagcagatcacgaggtcaggagttcgacccaatatggtgaaaccccatctctactaaaaatacaaaaaaaaattagccggacgtggtggcacacacctgtagtcccagctgctcaggaagtggaggctggagaatcacttgaacctgggaggtggaggctgcagtgagccaagactgtgctgctgcactccagcctgggcaacagagcaagactctgtctcaaaaaaaaaaaaaaaaaaagaaaaaaagaaaagaaaattaaaaaaaaagaattatctgtgtattttttatcttaaacaactgagaatggtgtcattttttccattcctagagttatttaggccaaaaaaatctagaatgttgaagagaacagattggggtgggaggtgcaggttaggggattaagagttctgtcctagagggccgggtgtggtggcttacgcctgtaatcccagcactttgggaggctgaggtaggcagatcacaaggtcaagagatggagaccatcctggccaacgtggtgaaaccccgtctctactaaaaataccaaaaattagctgggcgtggtggtgcatgcctgtagtcctagctacttgggaggctgaggcagaagaattgcttgaacgcgggaggcggaggttgcagtgagctgagatcacgccactgcatttcagcctggcgacacaatgagactccatctgaagaaaaaaaaaaggggttctgtcctagaatagttgcatttgagatatgtaagtgaccgggcgtggtggcttccagcactttgggaggctgaggcagcaggattgcttaagcctaggaattcaagaccagttacctgggcaacaaacacagtgagaccctgtctctacaaaaaaaataaacaaaattaaccaggcctggtggtgtgcacctgtagtcccagctacttggggggctgaggtgggagaatggcttgggcctggaaggccaaggctacagtgagccctgattgtgccactgcactccaacctaggccatagtgtgagaccctgtctcaaaaaataaataaataagaagagaaagatatgcaagtggacaatgacaaagcagctgaataaatgagtctgagtctagagctcaggagaatgggctgagctgtagtgagaatatggcagagattgatcctggggatacatcaacatttagaatagaagagaaacctgcaaaggagactggcagggaggagaggatcaggtgggaagaaatccatgagagtgtgctttttctggaagccaagtgaagctaatatttcaagaagcaaggagttaggtccagtgctgctaagaggtccaataagatgaggactgagaattgacccttggatttggcagatacaatcaatggtgaccttgacaagagtgatttcagtagagtgtaggggacataagcctgcctggggtaggttaaagagaaaaacaaagagcatgttcaattctttaaggtttttcactacaaatggaaacagtgaaatggagtggtagctggggaagtcaaaggaggttttttttttaaggtgggtgttttttatttcgcattttgatattgatgtacataatgcagcaaaaagagaacatgtagtaatgctggagaggaaaggataggtaaccattggtaaaagacctcaaaggtattagaagggattgagatgctcgtccaagtgtatgggctggccttaggctgaagcaagactgcttcaagagatacaaaagcaaattcattaccctaagaatggagtacatcacagcaggattcctggagagaaacagaaaagagggtcattaaaaacttatgtcaccactttaaagagggaagaaagttctgtttggctcttttggggactccagaagaaaagtaaaggtatactcataagcccaactttttaactttctagttaccagaacaccaaacaaggatcttagaatatcagattttcaattaaccctagaaaactaacagcatttgagtagaattcaaatatatgtgagagaacataatacataaataccatctgggaagttctctaatcaacattctccttccctagcactcactgttggatctgtagtacatgcatatgtgagtgaagagctctttcacaaatatgaaagaagcatagtatggatgtagggtgatgatttacttagtgtggtaagtgtctccaagcaacacagtaagggacagaaaaagctgggccagcctgcctctgggagagacatgccaagcttttctatctctgtgaatctcacaagtaaatgaaaataagtgcaagtagtactatagtaattaaatcaaactatcttctttgagagtggctttgtatgtgtgtccccattatttgctaatttactatttcccactgcttactgattaccctgagtatgttgcatttattgtcctatttaatcctctaaactctatcattgccattttacagatgaaaacatagaggccagagaggtttaaatggcttgttcaaggccacatatctaggaagtgggagagtcaagattctaagtttaatgcccatcaatgatagactggataaagaaaatgtggcacatatacactatggagtactatgcagccctaaaaaagtgagtttatgtccttttcagggacatggatgaagctggaaaccatcattctcagcaaactaacgcaggaacagaaaaccaaacactgcatgttctcagtcataagtgggatttaatgatgagaacacatggacacagggaggggaacttcatacaccggggcctgttggtgggtggggggcaagggcaaggggagcattaggacaaatacctaattcatgcagggcttaaaacctagatgatgggttgatgggtgcagcaaaccaccatggcacaagtatacctatgtaagaaacctgcacattctacacgtgtatcccataacttaaagtataataaataagaatttttaaaaaagattttaagttcagtctttgtttccaaagccagagatctttccactataccacactgcctcttatgtagtcagtgataataatagcttggtcatttgcatttgtgaagcaccttttatttgaagagctgaaactctgtaagccttatctttgtaatctggagagaggaagaaaagaaccgacatttattgggcaccttatatttgtgtgtgatgtaattttaagcactttcataccagacatgttaattatcttcattttaaagatgaggaaatgaaactcaacaaagaaattaagtaaattgcccaatatcacacaactcccatatagtcaatcctggcactttccctcagcagattctaagcaccgttggagcagagagcaagtctgtttttaatcattctgattttcctagtgcctaggacagggtctcactctggcacataataggtgctcagaaaaaaaatgattgaatgaataatgagcaaatgtgctgtaagctgaactggaatgcattgagtcttgtgttgtacttcctggtatcttccagtggatgtcaacatgatataatgagaagattctgagaaggaatcagtgaaggcatgcatgttcctgactgtgaaacttttgctcttctcagagctatacaacctaggtgatagacttccttttctttcattgggaaaactgaggcaaagtttccttggcaaagattttgcaagtcagtggacaatttgtggcacaactgaaatcttgagattctcacctttatagccctaaccacttaacaaccctgtggtcctggtggggttatagctttccataaatctggtacttaatcatttaaagagatggcaatttatcttaaatacacgcctcattatagatgtgtcacacttagcacagatggtctcagaagtttttcctggcttcccataccctaacagtatctagtatgttaatgtcaatattagctttactgttttaggtaactttggtatgcttctcattagctgaaaccgtaaagagctcagttttacctgcgctgagggatcactaaattcctattggcatctgaatgcacagtcccatgtcgaaagtgaggtcatgtttctcctggattatgcccgtatctgatgagcctcggctggcgtgaatccgagacaatgaaataatcacacccattagctcaccagggccctattaagatgtggcctggctttccatccatttctcctgcttggaaaaactgacacagtcatggtttgtaaaggttagtgcagatggaactgcttcaacaaccaaaacttagcgttaccctatttaaacttgggaagggtctgctgcttaatcttaagaaatagcacttcaggagccagggtgtgaggatgtcctttaatctctttgtatgtgatggtaaagctgaattttcctaacaccctccttccccgctctcagcttcagtggctggggtgggtgaggtgggggagctctggagttgtggtttccatactttctactttttattctatttttctttagagatcccaggttttgaaggcttgagtctagtaaacaaactgtaatggttaaatcacgattttattttctcgttgacacctagtgtgtgttatatgcagcgtcctctgcctcatgtcattctccaatatgctttctcagggctactttcccagaccctatgccttcttatgggttgtagctaacagttacacttccagagtatgccgtccctcacccacagagctcttctcacaactgtaactaactgattatttgtgtaactgtttgcatgtttaggctgtaaggatgcagaccatgtctgtcttgctcacagctgtttctctagtgcctaagtctttgcttgatacatagtgggcacttggtaaacatttgttgaatgcattaatgaatcagcttatttaattctagtgaaaaatataaagaaatatcccccttatattggcttggggagccttattctggatatatttgataggatttttgaaatgttgtcaacaacttgaatgaaaatcaccaagtttaaaatgaaggttcactctgggcaggagagaagatgatgctattggagaaggattacacaagaggcttctggaatattgataatattctatttattaagctggaggactcctagggacccaggggcctcagacttactcctgaactggagggacatgccaaataagccacctgctatttatttcacgcacacccaaggcaaagctgttggggccacttaaggattttgtaaaatgtgagggtgttattaaagtaggcttattattttacagctcttatgattgttcacctaactaccttgaacaatactgcaagtatttttctctgctcacatatttggagacatgcagagccacttcaaacaaaccatcctgacttcccatttgtatctacgacctcatgaacccatctcaaccccccaaaccacacactgaaactaagccaaattaaaaacaaaaaacaacccaccacccagcagtatttagttgagcacctactgtttgctttgtattataagctgtaattacaacagcttgagtcttgtcctcagcttcctgaaatctcccagtggatggcatcatggaagaatgagaaagttatccaagaatgaatggtctgatgtcaaggaagcttttcagcctttcctaatggtctgatgccctctgtgtgggttacaatctttggaagtataagatttcttgtaaaagtcacagcacctgccaacatagttgggcagggacccaagtggggtgacttgtaccgcattcctccctggtattcagagaccacatagtaccagaagcttgctaggcccagctcctggggactgtcagaggaacaggcccaggcagtcttctcctcagattgcaatcaaaagttgcttgataaatcagtaagattgaaaatattcttggcagtttacataggcaatggtaagaacatgtttttttgtagttacaatgagtacattatacaagggccggaagtgaccaaaatcattgattggctaattagacataactgaagggtcataatgcttcagtcgttatgtgggaatattcataaagcacttgagttcagctccaataaagaggagaaatgtacccagggaaattgcagagtaaaagtctgggaatgtagatagtataggatgttacaggtctgaaatggaagggtttactatattattgagttttgcaaacagattcttggaaaacagattcctcaagtctttcccagctttcagatgggatatgaaactagaggctttagcctttacttgtggttgtctaaaaatccaccctatttttcttaggaagggaagcagttgccttaacaccctggccagattcccaacatgtacagggtggcccatttaaaacaggcctgtggatgcttcagagtgagcgaaggggtttgttgtaaagcaccatgtgtatgtgggtgtttaatgaatatgagctgattaaattggccaccctgaattataacctcataccttctctagttcctctccagtttttagctcaggaccatattcttcctactttctgctcaaacttgttagggagaaacgttcccactattaaaactgccagtgttttccacccagtgtttctttgtttcaacgatgagcagaagaatccagccttggaaatacctttctttcaaattgcttgtccagctgcaatgacgtctgcatcagccacacccacatcacttccccttcgaaccttctcgcctccatctgcttccctgtctctggtgtaggacaataccagtatctgtctggagcagatagtgaactctgccacaaacagaggagggcttgtgtgaagaaggaaaaagctctgctttcgaaatcaagcagcctgggcttgtgccccgtttttgctaatagccatctgtgtggcttagggagtcactgtcttcacaggcccgagttccttcatctgtaaagggaaggagcgagacaaaatcagcacttctcaaattgggagctgtagattcttgaggtctgcaagtttaatgagattttaaactttttatgaagtttttttttaaatcataaagacaatactttgcaattaaaagtcatttaaaaaaataagtcttaagtttgttaagctggtcattctgaaacttaatcttaggtctcctagagattttttaacagttttgcaagtctcaatttttcccctttaaaaggactccacatatcactccagtttgagaaacactgaactcttttcatctactcagaaactgaatctagcggtaggataaaacattagctttaactttcttatccttaccctactcaacctaattacttttggcccacttcaatatgtttaagtcttttagcacatgggctccttttgttttcataactgaagtatttcctgttttcaatcactatatgttaaattataaaaagcatgtttctcccaatagctctttccctttccctttaagactcagatcatttaatttattagtgcccaacctggttaattgagaccaccttcctctattaatgtttctttgttggttgaagtgaagagatatatggtctgttccctaagtacccatgaaggattggttcaaggactcagccccatactaaaatcttcagatgcccaagtcccttatataaaatcacataatgtttgcatataacctatgcacatcctcccatatactttaatctctagattacttataatacctcatacaatgtaaatgctatttaaatagttatcatgctgtattttaaatttgtattatttttattgttatattgttatttttcattgctttttttttttcaaatattttcaatccacattggttgaatctacagatggggaaaccctagatatggagggctgactatactgcttttatctgtgatctcaagattgaatactcacagtagtttatgtatgcattctgctttcataatttgcagaatgctctcatatacattatctcttgattttcactgcagtcttgtctaataaatgatgtaggtagcatgatccccattttacagatgagacactcaggcccagaaattttgcttcatatcttctgattcagtctacttgttctcccaacaatgcttcttcatccaattacagcaacaaatacatactaggtacctgttatttgccatatgtgctgctttattgttacttgttccgggaaataacaagtggagcttctcattcaaggataaactgatattgccaggccttgctcagtctgacataagtctcatgccattatttactaaaatagctagctactctcacccagtccggttcctggtacataaaggaactcaataaatatttattggatgattgagtgaatgaataaatctaaaataaattatatcattaattaaaatttatatattggagataatttttgctaatagatttttgccaacattttttcagattccaagtcaataggatttactcagagactgccaagtgctttaaggggaaaacagagggactgctgggagaagggggtgcactggtagacaagtagaggaaatcccctttctggcttcatccatcttcctgtctatgatcggtgtcctaggccttagagtggacatggagaatggtatcactttgtctgcctgcagttaaccaaaatacttactcccaccatagggagaagagaggaatgacagaggtatgtgaagattaagtagaaagaccgacaaatgtaatcacattggaaggtagaatggagggtagaaaagttggtgggaagacaatttctgtggtcaggatacatctgaatggaaaggggagagagattttgtccattcctcccatagtatggtttggctactttccctctacttcccaagagaattattagtgaccagggacatcacattttaatcaaggcaactgttgctgggctggtaagcaaggctcccatgggtgtggtgaagttagcagggtgaagagtgaggctgctagtcacaaagggatccactcaccctcttccgctgttggcggctgctgtggtatctataaacatagagtgtgtactcacatactcataaatgctagttattgtcatacgattgcattgtgtataaaagtagattgcctggaaaaaatgattccacttcatttttatatacacattgttcctggaaccacttcctgaaatcccaggcttttattttgctgtcattctcttaaattgcctctttctcaaagcatccgggttctggagatgttctcgtgcttaaagtgtgtttctaagtagcttctgggaaccacgtaaaattgtctggctccacttgaccaatgaggagcttacttttcctcccaattattcctctctgacagaggccgttggtcatcttgaaaagctaagaatgttagatgggaccaaagtaaaattgcaaagcctattcacccagccaaactgaaacacacctgattaactgaccacacacatggtctcagaatgacatctcacttggggagtaaaagccaacagttgtggttagtgccccagcaggccccagatggttagagttaatatacacctatgttttctgccaggtagttttcatcagtttcctcaggatgtcagtgtgtgtgtataattaagagtatttaatcatattataattccccacagagagatggagtgggggatgaaggatcgctggcttttacagtctcagcaagagtcatcagtggaaaaaaataaaaacagaaaaatgccaagtctctgggctgtgcctgtgccataactcactcagaagtctggctggcaccactacctcagtgtcatttcagtgaagatgtaatcccaaatcttttgttgcaatcttagggttctcactattttaacattagcttagaacatgtggattgcaaaggaaaactgtgttctaattccctgttcatcaaggctgtgatttgtgtacacccacataaggcaaccttcagtttataagactgatgacttcagtcttgtaaaaataaatgagatgggcacttcaaatattttaagttagatcaatcagtagggtgagcacagtttaattggcatctattgatacatttctaaattaaaagagcagaatatagagccatgaatcttagccatgaaatcatgttcacatttattacaaatccataattctttcctatttccccatatatcctgttttctttgtcctgtcaattgtcaaatttagctgctggaaatgatctcttattttggattaggaaaccaagtcctaatgaccgtaagtgacttttcagagtcacacagctagttagctagttagaatctgactcaccagaattccagtctttctactttgccagatagtctttactgggaaatacttttttacctatttcttagaagaatttacttatgtgagcttcacttaaagcaatattggtctatttcctagttcccttaaactgatcatggtgcatttctgttaaaaaagccatagagttggccgggcacggtggctcacacctgtaatcccagcactttgggaggccgaggcaggcagatcacaaggtcaggagatcgagaccatcctggccaacatggtgaaaccccgtctctactaaaaatacaaaaaaattaaccaggcatggtggcgggcgcctttagtcccagctactcgggaggctgaggcaggagaatggcgtgaacccaggaggcagagcttgcagtgagccgagtttgcgccactgcactccagcctgctcaggcgacagagcaagactccgtctcaaaataaataaataaataaaaagccatagagtttctttataattaggttctaacactacttcttcctattagtcaataacagtgccacaataagtggattgggttaaaatgaaaatcaccaattgagtctctacccaaaaccccttccagttgctcttatttaggaggaaacagcttctgctcagtttctgtccactcacaagacctctcctgcatggaaccctgtccacagtttctatcactccacctgtgcttacttcagattatctctgaaacaatcagatgtaatggccagtggatgcaaaatacatataaagtaagatttgggattaggaggctcaagggggatggatatgtagagaaaagacctaggaagaacaagaacagggactggcagaaaacacattctgagacaaaggccatttatttagctctggccagttggtttatctagcctgacatttctcaacctgggcgctattggcgttttgtgccaaattattcttgattgtagagagctatcctgtgcattatggtatgtttagtagcatttctgcctcttcccactgggtagatgccaatggcatcccttcatttgtgacaaccaaaaatgtctccagacattagcaaataccctggggagtgggaaagggagagagaggaagaattgtctccggatgagaatcactgatctcactcaaggttttatctttgacatcagcgccataagatattttgtgagaggacagagtggcctttctaattcttaaaagttagggttctactccagacattccttatctactgcaaatacaaattatttatttgttcattcattcaaataacagttattacagatgacactatgtcaggctctctgctaagtctaggtgaaaagacagaacctccccacaaagacttagaacttaatactcttaaaaatcctagtcattggagttgatttgctcaccaatgctaacaaagttaagactttgaggttgtattcccttatctggctttaactcagaccaaccatttcactgattggaccagcacaatgtatcctggctactctaaaagtcacttaaaaaaacatatcctactggtggtatgttgatagtttcctgggatatgaaggtgggcatggttaaagctgaaaggactcttagcgacaagtgaaaaaaacctctttggtaaatcactagcatagtattacatggcttttttttggcctgggtgcagccccctttagactcaaaccactgttcttcctgataacacatggccttatttatgttcattgtatttatttagcttattttgattcctctttctacataagaaaccacaactggaaaaatcaattaatttttaatttgctcataaatttctacccattagaaggaaccaaggactcttgtaatttggcacaaatttcctttcagtatttttaatctctttggatatgtgtgagttgaattctctttaaacaacatgaaaatatataagctatttatataacttttaaaagtatcaaagagaagactctaacatccctcactgaagcttttccagaatttaccatgtgtaccagtgtaccagttgttctcaacccagggtactttgcccccagaggacttttgacaatgtcacagatgtggagggatgctactggtgtctacccagggacaatgctaagcatcctacaataaacaggatggtccctccaaccaagacttatccagcccaaagtgacagggtgctgaggttgagaagccatgtggtatataacacagatgtacacactggaggaaacgtcactgaagtagatgctggtcacttaccagtttcactccttcaggatatcctcttctttaaacgaggaggttgtgactagttacttcccatgaaaagcagctgacccttagggttgaaaagtatgtttattcccaatagcagtgaatgaaaaaaaaaaaacacaatgaatttctacttgcaagaatgccatctgtggttttctccaagtgttgctctcagccctcagtgttcagggtcttcttcacctgtgcattctgctgccctgcgttatcagagttagaatcagggtggaatacaaatatttccccaggcat[450 bp omitted]tattttcttccggaaaatcttgttgtttacgtggttggaactttattattacacagattattataaaaatgaaccaacactcaaaagtacaaggcaggatttcccacaatggctatgtcctggctggccttgttgctagctggcacagtaatatgccacctggaagcaatgaccattggaaaagaagccaggaaaaaaccttatgagaggcacagggcagtagataatttgtgaagcggtcgtttgcctcccagagtggcaaggctggcatgtctggcctaagtgtacactcacgtcatttatcacatcctctggtagcagcgcctctctccactgcctgtgaaggaaactgttgcacaatcctgaagatctgactgaaggaaagttgtcttgggatcagaattaaggttcctttttcttgttttcatttccgagttgcaagttatgcccctttttagcgtttccatacccagctgtctacattttaagcaatcgttatatggaattatatcttaaatgtaaaataacaagaattcatttaaaataactgctttccctccagaaccagaggtatctcaccaaagctgtcacctccccaccagtatactccaattgtgggtgacagttgtgtttagaaagtggtgttatagctccttttatgtaggatgattactctgtggccatgaccttctgggatgaacggaaagggctggacagagttacacagcacgacgacagaggagaagcttgtggaagtgcattgcaaacagagatgggcgagttaagttactcaattgccatctgcctctgttttgctaactcattagttcggacaccacattgtgttaatccccacttccctggctctgagcttggtccaggtctcgggggaacagtgagactgctcagctcgaccctcctgtcagctgggcctcagcttctctgcatcgacagcatgccaggcctgccaccctcgctgccacatcacatcaaggtgaagttttctccccagcccctggcaacagaaattgaagcctttggacttcgctcattcttccaaaagacttttctaggcagtgggatagattttcgccttacaccccctagcactctcttcccttccggcactccttcaaggcaactgcaatttcaggctgaccatcttggaagtttgatggcactgagtaccaccagccaaatgctctcacattttctgtgcctctcagaagaagagcccatatggcagctaagaaccaatgagtgaggcctaatttgtcccccaagactatacgagaagggcagtcttacttctggacctaatctagcattacgagcatccagtgatgacccttacggtactttctgagagtagttgctcataatcatcattgtctctgctggtgagctgactgggatacgcaaattgttcctatcaatttattttgacctctctggacttcagtattctatgtgtgaaagggtattttctgagaatgattagataatttgtgatgtctttttcagctttaagtatgaaaatgatatgctaattttatatgttgtcagacactactctaggcatttaacatatgcaatcccatttattggtacccaggaagtagacactattacatctctgatttgcagatgaaaaactcaggcactgagagattgtttgttcaaaggcaaaggtaataagtgacagcccagagattggctcccgagtctgtgctcttagccacttgtggtcacttaagatagtcccttaatcacttcattgctctatttcccgtcttctttccaaagtctgtgggttctcaaatgtgatctcatcaacatttagggcagtatcctttggaggttattgttgcccccttttttacaaatgggcactttgagataaaagcaggccacatacaagctattggcagaacccaggagtccagcttttgtgctgtgggttccatctgctatgtgtctctcccagtcataattaggatgatcaaaaaattcagatataacctgcttacccctctcaaccagggcaaatcagaaacagctccatagacaattgggttaagtttccaactcaaatgttgaatgatctatgcagaatataaaggcgtttacaagccaatgactgatacagatgcagcaataacatacctttccccagtcctctctttgctgtaaggcacccactgaatatcttacacctctctggatagcaggagttacagcaaattctgcatatgccctcccacatttagcacatgcagggctcatccaagaattttagcagcaggggatgatagagtttgttctctggttctttctgactgtctctgccctgatagtgcctagtacctgagtggcccttcctctgtcctctaatcccactggattgcacgtgccttttagcactggaggttctgaaagccaagcaagaactcctcctaatggcattcagtacctctttcttcccagtcccaggaggggtttcccagcaagcagagggaaggtgattgtttctacctctcatttagtccttcctttccaacttgatggtataccacctgcaaagctatcccagaaacagatgaagtttaggatgcccgaagactggtttgtgacatagaaaaattggaattgaaatgaaactgcacattcattgatatcacctctcctttgtgagtctggacctaatagagtggaatgaacaacaatactgaaataccaaacttatttatgcatttaagtcaccaagtgatttgggtttttgtatcagggatggttgttgcttttccctctgcaatgttaaactactgacccgtttcctctcaaattccagttccacgtttaactgaagacacacagaaataaatgtgtgttggcagaaagacaaaccctgagatgaagcaggaggtatgttggctgatagaaaggctgttattttaatttcttttacattgcagcagtctcagatggatagtatccaggtaacttgtagcgcctgcatcttattaaactcctgtttgattcagaatttacagctaaaatgcacctggaatacttaaagtaggaactagactttggttcatttgttctcaaaagggatgtacaaatcgattgcacaacctacagcaagtggcataaaaaccttcagaataagatgatggcacgtttttgttaataactatatttcttgatttataaattcaacaatgctaatttagtgtttactgtttgacagacattgtgcctctatagcaggatgaactcacaggcatgttttctgtacgtctgtctctttttattgcatgtgacagaaaccatactcaaagtagctgaagcagaaagtaaagttatcacaaggatactggcatatctatagaaactaaggactgggatgcagctgactcaaagaagagatggaaccagtgttaaataacattaagttagttggtctcacactcttacacacacactatctcttacacacacactctaccactacaaccactaaatagctgcactgtcgctacatagccaccacccacatgtagctactgagcacatgaaaggtgccttaagtgtaaaatatgcactgaatttcaaggacagtatgagggaaaaaaacataaaatgtcttaattttcatattgattacacgttgaaatgataatgttttggatatattgtgctaactaaatatatttgacatttattttaccaatttctatttttttcatgtgcctactggaaaattttaacttacatatgtgacttgcattgtgtgtgtgtgtgtgtgtgtgtgtatatatatatatatatttttttttttttttaattgaggcagcctctctctgtcacccaggctggagtgcagtggcacagtctcagctcactgcaacctctgcctccctggttcaagcgattctcccacctcagcctcccgagtaggtgagcttgcaggcgtgcatcatcatgcccagctaatttttgtatttttactacagacggggtttcttttgctgtgttggcccggttgatctcgaactcctgacctcaagtgatctacccaccttggcctcccaaagtgctgggattacaggcatgagccaccacactcagcctggacagtgttgttcttctagttggttttcctaaacatctacagcaacataaatcttcccatgccttagttagcctgatttagttgagaaacactgaagggacaatcagagacatatatcaccaatcaagtatatatcattctatttcatccttttctctctcctttactgtccctcataatttctacatgagccgaacacacacacttctttttgaaagtgaatgtatatattcactcacttcaaaaatacttactgaaccccaattctatgctaggtcttacatcaggcggtgaggatacaaagtccctgccctcacagagcttcctttctagcagcctcagccacttttagcttgttttcatgaatggagccctgatgtgggaagtgcacctcccagcgtggctgcatctggtccaggctgaatgattaacccttatagtgagtctaagttgaatgaaaacttggattttcagagtcgccattaataccatgttgtcaagggagatggcaaacgatgttgttattcacaagtcgggagccttcaatgatgtaaatttgtatttctcttcccatttttatggagccatatttcagaattcagaaatggaactatggaaatatggctctccccgtccccaaaaagagtccttcttctagacttcttgacaatatgtgtgaggaagcctctggattcagttgttttgtttttttaagtaactttttaaatgaagtataatatgtaaacaaaaaagtgtgtacatcgtagtgtatagctccatgaactttctcactgagcacacatgtaaccagcacccagattaagaaacataacattaatagcgcccatggaagctcctccttcctgtcatgaccccatcccacccctccaccctcatcccaaaggtaactaactactatctggacttctacaaccatggattagttttgcctgtttttgaactttatataaatggagtcatatagcaggttctctttggtactattttcttttactcaatgttatgtttatgaagtttattcatgctgttttattaacccatagaaaatatagatagctcccaagaagaaacataaaaattataatcctactacattaatatgtcagtgtttgtccttctagccacttttctatgtatatacttatgttaactttttttccaaaattagaccatagtgtgcatactactttgtgatttgctttgttgtttgatatatcagatctaccaatgtgttctaaatgttggtcgttgtaatgaggctatattctgaattgactaataggtaatacagaaaagtagaaaattattttttaagtacccataagtatttatattaatcattttgtccgatgtagatttgatccgtctcagtcaggcttccaaaagacttccaaataaaggtagcgaacaaatggatcactgattgctagggaaatctggtaatcaagaccaagttgggcctcttgtttctcaatgaatcttctaaatcactctctactgttttaaacctaggtattctgcgaatatgtaacagattaggaactgaataattctgagaatggcttgttagagtctctgttcaactcttggcttactctataatctgagacaagtctgtaaaatgttccttatttctcagacgaagagcctcatctccacatctgtttgggatcataagaaataatacttacataacattttggaatccttgaatgaaaagttttttggagttgctgactgttcctaaaatttcctcaactaacattgtggaaatccattgttgtggatatagttgctgagctaggtcataactagattgcaaatcttgagtagtggaaaaatctacgcctcgaagttctggtcatttattttaaaagctattcatttattcctagatgttcatactgtgagcttagcctgttatcattttggtttacttgctaaatattcacatttggggtcttcatccttacccatttaggattgtatctattggcatatgccattggatttgtctgagtgaggtcacctggaacactagtgttctgacattgagtttacactgcagggatgagagaagtaaatattcctattagtcagtaaggtttgaatttatagcctgagactcctcagacactgactgtctgggacccttggagacagaccagcattgaatgaaactgaaaggtagagaatatactgtggctgggaaaagtgatggagcaaatctatgcagagatacaatagtaggatatttaagagttggaagggatattagaggccctgtggtcatacttcatttttcagttggggaaactgaggcttaaggaggtcacagaatgagttagtcacagagctgggttagaagcttactttagtgtttcaccaactactcagatgtctgcactactgagatacatagagaaagagcgtcagaggaaggattagggtgtcctctagacctcattacactaatgcagtccctggtaggatctaaagacgtacttgtctccaagacacctgacaagctgagagtattgattcattctttcccaacttgggattgcaatggtgaaaggaatttggcattttatctaatcagcattggaaacttggctttcttttggagaattcaaaagttcagtttaggatatgttcacaagatactttcctccagaattaggtgggagataaattattaaatttatgagacttgtctttctttctttctttctttctttctttctttctttctttctttcttctttcctttcttctttcttttcatgtagcatttctttttcacattgtttctgatgacccttaacccctgctttttaaattcagtttcatttgtgttgtcacatatatatcagttgttgagtctttagtatgcggagatgctgagcttgcccttccaagatgttggaaggtcaactcactttatggtctaggtccaggaaacaagaatatttccaactcgctggggaccatcttggccttgagcagaaatgggatctgaattattacctaagagacctttgtagattgtcacagttggcagcctcaggacttgagctaatcctggaaattctttaacttcccagaaagaaggttccacaagggcaggctgaggtcctcagagagagcagatggaatagagcttacaaccagttgcctttacaactggacttggagataaataataacattatacccattttttttttatcatgaagcctttgactttcaggggatatctattctttattccttttaccctgtatgtggaaaaaaaatgctctgtatgaaagaaaagcaagcaaacttgttgactcagttcccatggtgaatgcaaggcagaccaggccaatagaaacaactcagatattacaaaaatgtgtttctttctggcagctgcacagtcagtcctttatatccagtcactgcaatcgccccatcacacaaaaccatttccaaggtcattattctggttgcgggggctgcttcccctacaaataaatgttggttttactaaatgtcctctctctccaactcactttatggcaaatgaggagtagcaaagcatcatttaggaagagaaagtgtagaaaatcagagagatgaaatactacaggttttctaaaggctcaggtttatctggctcaagcaatacaaattacaaactatggcaccacctgtataatctggttttaattaacttgaggaaggtacatcaatgttatttcattaaaatcaaattctgtttaaatggaaaaccaccactacagggtacattggggcattgttcacttgggttttggggttggcaagtaaatcctgtatttagaaaaacccaagcaaaccctgtttttttggaatcttcttatgcttcggaaggcttgtcataggttccttggaatgtagggggtgccctggtgaggaccaaggcacagctcaagatgttgtttgccaattcttccttttatgacccttctagtcttctgtcttcctgctccctgcctgtctccatatctctttagtgcttggccttgatgccctataggactctctctcccatttgccactttgaactgaatgatttgatccccactgggtggacagtggatgacatagggcactctataaacaaagatgctatttcaggcttacaagaggaatgaggcccacgtgatcacaaggggctggtgaataatagaaccctcttttgaaactctcacttcaccaattacctaagagctgggaggaacctgaaagatcctataatctacacacctccttttccgaggaggacactgagattcggaggtaaagaaactggtccatactagtgaaggctgtttgagtggggcctccccatttcgactcatgccctttcccctccagcctggtgccccagttctgcagacctgttgattacaacacagcccacgccgagaaaatcctgccctgtcagcagaacagctttacaagctgacataggacatgtgtgtgtttggagtcaggagaatggctgagttttagttccagttctgcctctgctttgctggcttcagcgagtcacttctccttcctttgtctatttcccctattgggaaggagaagataattaacctttccacctatcaggctcacttgagtgttataaagaataatgaggtgatatttgtaaagtgctttgagctgctgggaaagaggagggggtgagctccgtggaaaacattattagctggaaggacttatcaattgagctatttaacaatagcagagagtaaggatactcagaaatgaattccagggactagccctgctttgaatttaggaggaggattagtgggaacctaataggtattccgcttctccagtttcttcagtgcaccgtcaaactaggaaaggtaattacattcttctatgtcggattcagcccggagtttcaattgggatgtcaaagtgtgcttgtcctctattctcatactgaggctgtgttatggtgtgattgttaaagccttgggcatcttctatcccctggggtaatttcgcttaggagctatacaaagtaatttctatgcagtggctgggctgctgtttataaggttgattagtagagcttctaaatctaaagcgcctggggagcaatttggttgaagcagggaaataaaaggcaaggtctttatcatggttgatctttttttattgagccgctccatgggaattttctcagtgactcagatgcatctacagtgcaaaacgtggggcttggtggctctttgacatggcaatggaggcctagccccaggtaaaggtgaacttgccaggtcactaaatatatttagggcccccttttaacttcctttactctcacagagggtgatgtttttggggccctgaaatgtgtgggaatgtttccaaaagattgttctgatgagggatctgtttctgcaaactcctgccccactgtttgaaagaccgtctgccccaaattcaggtctttctcatttttagggccagggaagaagacagaggaagagaagaactgggggaattttgttttgaacttgtgcagtctctgtgggctgactgaacagtgagccaggcagaaggtggctccctctttagtcggcaggagcagggctgaattttatcaacatcttctgcaggtgtagggagaggtcaagatgtcatttggaatgataatttctctgatcaaagttaagttaaggaaattacagtgattgcatctttgtcccctaaagtttatgagcctctttgtaatcgctgcttccgcaaacccttccccaccttcccaagttctcaggcctccatctgcaggggctgctgggcttttccctccaggaaggacgggctcgccagctggccagaggttcctgtattagtgctgccctgtactgacttgtgagtctccagtaacaatcctccggtgtggcacagctacaagcaatgaccagggaggcccaccttgaatcctgaacctctttgggggctgactcagtcctctgaaactgactcttggattccttcctgggtttgccaccaactcatttttgtttttctcagcaaatcacttctctgccttgagactccatgaaataatataaggtttccttggcaggattctctgacctttttcagagacccagatttcttgtttattttaatttgaatgtctcaatcctctgaaagcatttggaatattttcttcatttccctctcccaaggtatctactttatcccagacagggctcccccagtgggttttgaggggaaggatgctgaggctttgggcccgggctcctgtcctttacttcacctctgccagggcaaagaccagcactgggctgacctccctgggctgggccaaaagagaaggctgtggaagccgcacgtctccgatgctgcccactgtcctttccctctgcagccacagctgcctccagcccccctcacccccgcctgctctttttctcagtgagcctcagcgccagtgccccagtgagctgctgggaacagaggtccgtcccctgcactggcctcggctccccgcaccagaacattcaggcatcaatgggaaacagcaagatctgtcggcatccccccctttcttcaggctttgagggccacattctccacggccatctgttccctttcacctctctggacaatgttgctttttaaagccagcgattcttcctcctttatcccctcctctcccgcctccccttcttctgtgctcccaccctttctacctctcctctctttgcccgattcctatgaaattagcctctcttaagataagatttgcccttcctccatacaaagctgttttgcaaacactatgggtttttgaatttttatttttacattttgtttgaagtgagggcttgctacttttaaagtttgtgattgtcttgtggagggggtagtcttttgatagggataggaagggggaggatagaaaaactttttagtcatgaaaaaagaaaatacagaataataatgagttttaggttcctgctggcaggcacttgcctctttaaagaaggaatcctccctttcctttccttgatgatcagtttaaggaaatttttatgctctcgaggtcttcccaccttttattgtattactattttgttgttgctgcaatgttgttgttgtgctgtttttaatttagagccagggcttctgtggatctggtacagcggattcctttgtcttggacagagccatatacaactccagaggttcctggattcaggcagagtgcccatggtgccttctagatgaagcaatcatcctgactcaagggctggacatcaaggggtgtttgccccaggactgaccagtgactaagtgtgtgaccttgggtacatcactttctttaagaataatgatgacagaatcatttacttcaaaaaatttttaacacatgattcttctgtttttactattacttggtttcacaagcaagacgagtccgtggtaatgtcatgaaaacttatgggttatccttgggtaaggatgtaccaagaatccaccgttagggtctagttgagcagcagacatgggaaatatctaaaacaaggacggactcctggctgtggctgcctgtcaggatcacagagcagggacacgggcaccggcagagttgggctgacagattgaatcctgtctctcctacttactagctatacagatatcagtaaggttttgtcatctataaaataggggcaacactagagatatacttcgtatggtcgttgagacaattaagagatttttatcacgtaaagcacttggaatagtttctggaacctggtcggtactatgtcgttgtccctcttcctatcccacatccacattacagatgaaaacatgggctaacgggttttctgcagggctcttcttagtctttcacattcaccttctgctggttcattttttcattgcagagtgaacactgataaaataaataatgtaattatcagattataatgatgattaacacagcgattctatttagaaatgtcataaaatagtgaaacatcctaagatacagaaagatatatgatcatgtacttctggcaaagaaggtgaaccagatgtggagatgatagtcatagaaggaaagccagtcatgattttggcaactgggatcaccttacatattttcagttggagaaaacctggagatttatttttcttttggtatcaatttctagaaacctgtcgtatgactaagagtttcccaacaatagggagagaacattattaaaatatgcttttctagaaaggcccaaatgactctgaataagaaactgaatattataatttaatgaggaaaagaaaatgaatgggatgtccagaaaattggggcggggagggggtagtttccatgcattttccctcctagaaagggagattaatggccattcttgtaatatctaaatggccaaaagaaacaatgaaaagaaaaataatgaatcagactctggggtttaaatcctgactctgccacttgccaggtggccttgggcaaatcactttctttgtagcgcagcttccttcactagaaaattggtatgataatggtacctccctcacagagataatgtatgtaaggtgtttagcctggaaaacaataattatcccaaagtgttacctcataattctttactgtaatgtcttatatcaactgacatctgagatgtgggacacattacccaaagttggtagtcttgatcactttgcggatgctggtcatttgcagtaaacccatagttctgtctcatttctggataagcattggccttcgaggaagaaggaaattggtttgcttaagaattcatattttgcagatgtgaactgactggctactgacaccaaaaccagttcccccaattaaaataaccctgctagcctcagcacattttgttcatgagctccctctcccgccatgaggcggctgcctgaaagtacttgactgccctaccctccactccccggggattgggacatgcttgtgaagagatacttgaggaagttaaagcaaggtcatctccattgcctaagccccacaccctggtaaactgcacactgtttggaccttgaaacttgtgagctgcgaattcctgtcataaatggagttttcctccctcctgtggccccagtttgtggtgagccttgtgttggcatggtggccatggggacacccctcgtgtgtgtgtgtgtaggcccccaaaaggagaagtgtagcagcttccctcagccttgcctcagaaagccgggtccagatggccaaggaagcacactgcattgaaggaactctgcagccagagtgaatttaccagtgtgggaaacaaaaacgttcgggttctggtctaaaattctgggagcaaaggacactgggattgcctccaccaaatgtcaacattttacttcttcccccacccccttctcagagcctcgagggcagcaaacatatgtgaggccagcattccattccctcccacgcaggaacatatgctgattcctatcaggatcctctgcttcccaaagaggctgatggagatggggagggaggaaagcataaccataaatcctcacactctgggcaaggtgataattgaaagcattctccaccatgacgtgctctccagtgccagggcagcaggcagctgggacagctaaagctggggaaggcctgggccggggcccagctctccctctgaccaggtgaattttggtggtcaagtcacttctctgcctatgaaacgggaataaggattgtatccatgttgtgggatcaaaggaagcactttaagtcaaattcatcagatgcacttaggcactctggagttttcaaagcacctcagcatttctgtcttgtctcacttgattctttttgctcccctacttgcactctgttcctgctgtcactgaggaaacacagcagagtgtgaactctgaaagctgacccttgtttggtgtcttgaagcaatgcaggtcaaggagcaagactgaggaggggccttaatgagggtctctgagtgaggacctgggcccggtaaccagccctggcctgtttcatgcccaggctatcagccgcccctcctaccaagtctctctgaattaatattttgggtgtctcctcagacaacagctccaagcagatgaattatggcagttctaaagggtatttacatctcttctctctattcctcttgggaagcagggtgggggattaagtcagtcttaaaaactggctaaagggcattctccagaatgatgtcttctgagattaaaaggacacagagccacatcacaagatactaggtggagattttctaatacaaatgcatgcatgatggtacatggactgtctgcgggatctgaggagtctgtaattgcaggcaaaacagcaaatgcctaatacatgattttttttcaaatgttagcatatattaggatcatctgagagaggtttttgaaaatatggactcttgggcatcacctccaaagattctgattcatcaggtttgggatggggcctaggattctgcattttacaaagttaacagatgattctgatgtatagaaacatatgaatgccctagtaatttctccagagatccaatcccatgtcttgattttatatcaatgaccaagtaatctctctggaaaggccaacctacattttcccactaatttttttgggggggaaggagagttcaaacctacagaaaagttccaagaaaagtatattgaactccccatataccctttacctgatttttttttgtgtttttttttttttttgagatggagtcttactgtgtcgcccaggctggagtgcagtggcgcaatctcggctcactgcaaactcctcttcccgggttcacgccattctcctgcctcagcctcccgagtagctgggactacaggcacccgccacaatgcccggctaattttttagtagttttggtagagatggggtttcaccgtgttagccaggatggcctccatctcctgacttcatgatccacccgccttggcctcccaaagtgccgggattacaggcgtgagccaccaagcccagctctttacctgatttttaacactttgcctcatttatttttatctcttgtatattagttaccaatttattttataatattgttaacttattataattatctttgctgaaccatctgagggcaagttacagatatcatatcctttcatccccaaatacttcagcatttatctcttaagaacaagaacttctcttacataaccacagtacaatgatctcacccaggaaattagtattgatacaatactattatataatatactggcaatattcaaactttgccaggtgtcccaataatgtactctatggcagttttttccaggatgcagtccaggattagacatggcattttagttgaaatgtctttttgcactaatggtttttaaagccattgatgttctcccagaaaaatttttcttcaagaacatatttcctaataaacaaatcatatttcttttctcttctgttcttactgcttgcaaagagccagtgatccaaagtgggcctgaagcaacagcaggcttacccaggcctgattcttcacaagctaaggcctgggcaaaggaccctctctcagccctgggtttgccttgtgagctgatttcctgaaggcaaaccacatgactgctggtgtgtccccttgctgttcagtcaagtgggtggccacctggctttctccttgtcccaaagtacttcgttggatatgtaaagcgaccaaatgttacttcactgtagtttgaatcttacccagaaagagtgactggtaaaggacatgccactttgcacccttcccagctctctccaaaggcagctggctgaatgcacacttctgagggtgatgttttttccagcactcagggatatacccagtgtgagatcagaatcagcagctgtattcattctgcctcagccagtgccatctgaaacaaacatcaagtggtcaaaaaatgagatggtgaccatgtataatacacaagacttattagaattcaactctggtatccgcctgctgcctctgactctacaatgggagcaggaaagcaaagctcataccaggacagctgaaaggtgtggtctgaggatttcatggtgaacagatagaacacactgtgggggaaaaaaaacatattttatgcaagcatctttctggcttgtcttgaatgaagctaaatttaaagagaaagtgccacagatttctttaaatggttaggtttttgttttctttgttttattttgctagtatttacttaagggtaatatgtgttttctgtaatgagtgaatttatttttaattaaaaacttatttgcaaaggtcaagagatttcactacaagtcaccattcaggattttttttttcctttccttaagtagaaggtagcaaggggaaagctgtattggagaaaaggttcaggggcatggcctcctggagaatgttgggagttgagctgatgggaggagattgcttctttttattcagacaatctagttctgttcttcttatgcctactattgttttccttgccatctttgagaccttgatgatcgacactgcagacacagcagagaatcctagtacagactgaagcttttcgtataaagtgagcatgctcactgtgattctggacagttcctacatagtatctctgtaggataacatatgtcttggttttctcagggcaagctcagtttatctctgttatcccagtataactattaaaatgtccccatttcattttcaaaaatgtcctggttggataagaacttaaagtattttgttaagactctgggaaactgaaggtattttctccctgtccatgagccagtggagttgttgagtgatttgtgctggtgcataccagtctctagcctagtggatggctcacccccgcttctcccctaccttgtgctatggaggatccatccctaactcttgcattccagaggttctgattgcctcacttcttcctgtcttctgcttcacatttcttacctttctcagtaacgagtttgctgagacttgcatcagcctaggtatgttgtgcaagtaaagcctctggactgcattcactcctttcacctccagccaagagacatcaggaatgaaattttctgctttactaaagtgaagcagcccattctttaccagccaaatgccttcctcggtgggtaaatggtattagttgaagcagttattacatagttttatgcctcagatcctgtatttataaatctgaaagacgactaatagctttaaagtattttgagaatctcaaagctcagaagattataaataacaaaagatatattttttcgtatctaaaatggtagcacaaatactgcggttgcttacttaatagatagcgtgtggtccctgagccattgcagctgatgggttttttccagtgctctatttatagagctaggtcagaaatatcacttccgttggaacctgacctatagaccattgtcaattttagagacccaaggaagtagaatgcaccctaaatacagctggttcacagattcagttagtgaaccacaagccctcaaggaaattaattttgctggaagataaatgtctgagcctatcccagtctcttttctttgacacctttgtcctgtggtctcacagagcttgtaggtcatcttgaatctttattctaaaaataacctattataggcagtttcccagctttaataacttactcatcctcttcgccttttgttgctaaaattctgcattgaatggaacaagaactgatgacctgccaagagaggtaaccaagattctcagtcccttccccagttcaaatggatggtccaataaagaaccatgctcagcaagtgccaggggcctagttttaaacaggagaagctgaattgaatggatgatgaattgaatgaatgaattgaatccttctgatccctagtctcgcactcagactcccgtctttaagctttgttactatgaagttgtgtttgctgggacttggccactggtcagcacaggtttacccatcataaagtcttactaagtagggtagactaagaaaatctctagtctggagagaaatctgctatcagcaaaagaacccatgcctgtgctcttttcaagcacaaacgggtgctgggtagggcacagcgattcaaagacagcgcatggagtggtgcattctcaaacttcctggaacaagtgaggttctcgatgaggaactcattcatatcatcaaaataccaaagactcaaagttttttaataaggcaggaactattgaggtcatttaccccttcttgtcatggatgaggaaactgaggctcagtgaggttaggtaactgctcattaccaaggcctactctgaggttctttgttacactactctccttctcccacctggtctcatcaaaagcccagacggagtcagaaatagaactgcagggtcctgctttctagccagcagctggccacaggctatcatgcattacatggaatgtgcttcaggacgtgaggacaagagatatgaacgagaatgcagttccagtggtaacataccatcttcttccctggatttatttcaatcctgaaaacatttgtaggtattgttattcctttatttttttaaatttcctctttctactctaaataaatgggctttcatctgcagggactggagggaccaaatatccagaatatccagtccgctaaggccatgaacttttccttcccctctgttcctattttgggagtcattgctttgtttttttgacttttttttttttaacatggaaaagcattcttttaaagttgacccttttgctgcagggcaaatgcttttctgttatgcactagagattcagtttgatctcctagaaatgcttagcacaggagtcataaattgaaatgttttcagagaaggagctttctcattaagagctttccaacaggcctcttctaaatactgacacgggttggtaccagaagcccatcacctttttggaaatcaaggctacatagcaacctggttatcctcctccagtctgattgcacgagggctacaccccatgtatacagagcagagagacagctccttgccttgtgagaaattcgtcttcataaccaactcccacaccaaatgagtaaggaattggatccaaaagatagtcatgaaagatattccagaatccaaatcatgtgttttaaccactttgcaactaagatttactatcttgcctcattgttaacagaataaaaaatgcaggagataatgattaaacttctttcctccctagaatttcatcttcagtgtttgatcatcattgttcctgtcacttatacatatcaagtatcttcatctaagggtcatcaagaacctctggttgcctggaggccagaattattattcacattttacagatgggttagcaatcacagaaagagaacatgctttgacttacctaaaagagtctctgagagagtggagaatgaatgttcccacagtcttttacagagccctgacttcagtgtgagtagattagatttgctctatgtagcttacacagagacttctacaggctcaatcccataacaatgaaaatcctcaaaaatgaaaatattttcaaagctcagttcacgtatttgatttttgtatttgcattggaattaaccaaattccagacaatgaagttatactgctttggcaggtctaaatatcacaatcatcaaaaaggagagagagggagtgagcacctcaatttttagaacttcctcttaaagtgaacatagagaaggttcacttatctgtttcctaaccaattaggtcatcttgcaggaaatcaccttttcttaaaagccagtaggcagattcctcctactttaaatttcccatcaacagcattaacaatcatttatgccagccctctcacaggaatgcttgaaagtcaaaagacataagagaccactaagttttctagtttaaaataaggtcacaactttatagtaacttacagtttccctacctccctctctcaagtgattctatcactgcaatcacccttcaattgctttcctatacttgaggccctattaagtaaactatctttccaatccttgccagatttttaattctacaaccagagaggatcagttccaggccacctgacttgcgtgaatccagctgctgggccagttgagtgagattaagtaacttgctgagccagagtatgtgctgtctttctggaaaccccttgccctgggttatcactgtacatcagaacagaggaagccgagtatggagcctgagtgacatgcagagctcagatgagtgataagatcctcatgacacacttccatcggtatcctcccagagatgggcctttgagctctcaagactcttgtgggctggcagaataacacgttatttgacatgagagacatgataagcccagagaaagctaattggagtagtggttaaaactcagttggcctggtttcgaaccctggctgtgtcagtaactaaccatgtgaactggagtgacttagtttctcatagcctcattctgtcaatagggatgttaatattactcacttcataggattgttgtaaggatcaaaagagatgtagctaagatatgaagctcagcaagatttaagcttacatagtgcctagcacatagtaccttaaaaaatattgcctttccaccttgggcaacatagtgagaccctgtctctacagaaaaataaaaataagttagccaatcattgtggcatgtgcctgtggtcccagctactcggtaggctgaggtgggaggattgcttgagcatgggaattcaaggttacagtgggctatgatcatactactgcattccagcctgggcaataagggagaccctttctctaaaaaaaaatttaaaaattgcctttcattatcattaactttcaaggccttgctgttattacttttatggtggattaatatttgtaagaactcctaaaaatacaaatggatatttttaaagtctatagtagactacagtcaagcttgctcactcagggtttcctttggaaacttttctgtggtcatctgtactcatggcccttacttaagacttgggtttacctgtccagaaaacaaccaaatacatgggtacttttttatactattcttattgttttagcgacgcggagtcctttaaatagttgctcctggcccaaatgtggctccaatctctgaagacatcctgtgtcttcctttagacccgagaaactcctacagtttatcaccaaaaaaaaaaaaaaaaaaaaaaagtttgagtgcttaactagcaactcctaattattcacatgtagctttttcttgacaaactttagagcttagcctcccttgatcccatcacttagcaggcatctaagcaactaatttctagagtttacttgaaaaatgtaaacctgttaattttagctaagcaagatagaattaaggatgtaaatctgctgccaaaacaaggatacaatatgattcaaaatttagtggaaataactttttaattagtcatttagtcagtattataagcatcctctgtgtctcagaccttgtgttaagtaactcaggcatgctgacatacatcaggcgtgggtttggcctctttataatatacagtcatatgtcacttaacaatgaagatgggttctgagaaatgcatcattaagcaattttgacattgtgtgaacatcatagaatgtatttacacaaactgagatggtatagcctactacaaacccaggctgtatagtatagcccattgctcctagtctacagacccattcagcatgttgctgtactgaatactataggcaattggaacacagtagtaagtatttgtgtatctaaacacatctaaacagaaaaggtacaataaaaatggtaaaaggattaaaaatggtacacctgtgtagggcacttactatgactgcagcttataggactggagttgctctgggtccgttggtgagtgcacctactgatgaatgaacatgaaggcctaggacactgctgtacactactgtagacttcataaaccccgtatccttaggctatattcattgatagagacatttttctttcttcaataataaattaacctttgattactatcacttttttacttcataaatgttttaattttttaactttttgatcttgtaataacataactgaaaatacaaacattgcatagctgttcaaaaacattttctttatatccttattctataatcttatttctgttttttagatttttttacctttttaaacttttttgttaaaaattaagacacagacacacacattagcctaggactacacaggatcaatatcatcaatatcactgtcttccacccgcccatcttgtctcactggaaagtcttcaggggcaataacacgcatgaagctgtcatctcctatgataacaatgccttcttctgcaatacctcctgaaggatcttcctgaggctgttttacagttaacttcttaaaataagtagaatatactctaaaatcatgattaaaaaaagtatagtaagtacatagtacataaaagtatagtaaatacattaaaagtatagtaaatacataaactacataaaagtatatatagtaaatacatcaatatagatatgataaaaagtatagtaaatacataaaagtgtagtaactacataactggtttttgtatttactaaactggttattataagtagaatagactctaaaatattgataaaaagtatagtaaatacatataataagatcaagtattatgtactatgcataactgtatgtgctatacttttatacagctgagattatagtaggtttatttaccctgcatcaccacaagcatgtgagtatgcattgtgctatgatgttaccattgctgtgacatcactaggtgataggaatttattagctgcatgataatgttatggggccactgtcatatttgcagtctgtcatttgctgaaacatcattgtgcagagcacgactctgtattaaaggtgataagaaaagcacacaaataatataccacaggtagaaaatgattgtaatatgagacagtaaaataaagtattatagaagtttacaggaggaagacattatttctgtgaagattagagaaattggcacataggaagtagcattgaaggcagagtagatttgggacatgtgaacataggggagttccagatgagggagggacatgggaaataagtgattaagtaggaacacagttgtgggaaatggagcagggggaagaagtctggaagggcaggtgggcgcagggtagaaagtccttgaatgccagtgttaggaatttagaattctctgaagacacttgggagccactgaaaggttttgagcctgctggttgtaaatgggagggtggtgtgcttaggtgtgtgcttggaggaggttaatcaggtagtaaaacagagggtggctttagtagggagaaagccacagcagcacagacaacaggcaactaaagcagtcacaccaggtgaaagctaatgtgggtctaaggttgatttaggaggaatggagagtcaggaatggatctaagggtgaggtaggagaaatgaatggatggatataggtaggattttacagttaaatcagtaagacctctcaatttattgcaagtgagaagcatgagagaaggaaacattttgaaaatggagctgaggttttaaaccagattaactggagggtcaaaggaaggaacagagatggagtagatttatatgggaaaatatgagcttgctttgatgatactgaatttgcagtgctaaaatttatgatgtagacttgcagttcttgtggttaaaagtggaagacaagtgttgagacaagccaaaggttgcgacaaaggcgtagaaaccatccaccttgtcaaatgggctctcatccttttcaaagtggagccatgccatgtagagcagacactgcaagcttgatgggaatgaggcatatctggctcaaaagcatgtttatttgtgtgtttttaaaagtgtaaatattgaaccaacattttaaaatcaggaaattatacttaaaaagcattgatttctggcttccgttttaaaaatcaaaattgcgctttaaagttagcgcaattaaaaaatcatatcactatgatttttaaaaatcaaaagatgtgattataaaagttttttacaattttaaaataaataaataagatgtgactaactatgaactcacattgccacatgacaacagctagagctgaacagagactgcccccttgagatcctggatgaattctcgaactcaccacagtactcaccacttcccctcatctcctaaggctttaattgaaagtcagttactaaatctatagagaaaaaaaaaataggttaatggttgccaagagctggaggtgggcagggaatgaggtgttggggactgatggccagtgggtgtgggatttctttttaggggtttgaaatgttctaaagttaattgtggtaatggctgaacatctctgtgaatatagaaaaagctgctgaactgtacacttgaaattggaggaggtatgatagcaaattatctcaatagagctgtttttctaaaatgcaaatatagttgctattgcccttgcagtgttgattttcttatagtagaaaatatttttctataagtctatttctatcaaaaaggggaaaatgaaaagttagactgagagggttgtgaatttcaagagaaatggtaaagactatatctcttagtgggggtgaagaagttctacatgttaatatgcaagcacttggcctctttactaatgtacattattttcctggatactgaaagcatctggtattagacaagaaaaaatgtggtcatgccccactccctaaggtccacccacaactaagaagaaagagaaaacaaaggcagaaaaaggaaaggagtaatcaacatggtaaaaggagaagcagaagaggccagtagattggatgccaaggaagggggaagctttatcaactgctgacaagaggtcaaggaggatgaggccagggaagtcaggaggtcatgggagaccatccagtgaggaggctgagagaggtgaagccagagagagatgcagaggcagctgacaaagtgctcagagtgcattgtttaggagatagtatttaatctcaggcatgaaggactactgaaggcattttaagtaggggaatgatgtgatcagatcggaacaatctagattatttgttttcacattaatttgtgcatattttgaattgtgtgcataatgaactgaggttaccccaaattttattctttcttacactaaattctctttcaatctgatatccccaggcttgttgagaccttggttattgatttccatctcattcattcctgttcctgcttgaaccaggaaatagatatatatggttggtgttatctgacccaggggttctcaacttcagcactgctgtattttgggctggataattctttgttgtaggatgctgtcctatgcattataaaatggttagcagcatcaccagcctctaccctctagatgccagtaacactgcgagttagacattgccaataaaatcaccctccagccaagaaccactgaactacatttgtctgttgcagcatttgggcccaggtgcttaaggccatgtgcagttagtagaccaccctgaaaggtgtctgccctggaaaaaaaaagaccaattcctactccacactgaggcgtacaaatcagatgatgtagtaaggggacaacggatgacacattcaaggcctcattttgttttagctaattcagtggacttcaacctctatgtagtctcctcatagaaaaaagatcgcatctggaggcaacaaggcacactaaatgtccaactgtgccctcctaaggttaggattcctgtcatggcctagggccaaagttggttcagaggaggccttgggcacagggcacaggggttcagaggaggcctcgggcacagggcacaggggttcagaggaggccttgggatgtgctggacatgatagtgggagctggcttctatgcagcaggacttgttggcttgccttcaagggggaaggagcaggtagggaacagaaagggttttctcatggtgatatcaagaagggtcagtaaagctttggagatgtaagatgcaatttggaggaggctaggaactcagatagagtttacttcagaccctcttccttataggaaagtcttagaaggtaaaggaatgtttctcttggaatagggatgtctaaaacagcttacctatgaaatgctgagatcttctagattcctttttttgcgttgtgtatacgggggggtgggaggaccagggaattttacatgtatatgccaccatttctatattgatagggaaaattgagttaagactcttgtctagctaaaaatgtctaacaactctattaaactaagactatttcataactggttcttattctgtggagtagcattatgccttagatattgaatggctagatttactagtagcaatggctctgagctatcttgcaatgcaacctctttttgatatataactctgttattatttggcccagtggtggtcactttcaccaaggctgaaggaaacccctgctggtttttagtctcatattccttaacccctctcctacttcactgattcctcaagttctgtggtaatgaactgagcctccaagtactctctggactactggcaatgagtaatgtctggacttcatgtgaaatgccatctcaagaaagggcatctgaaagcgtgcttttaccatttcatttcaggcacttctggatccagctgtgtgatagccgcactaggaaatacctggagtcacagtgtgaatacccggctgatcctccagtaccttgattcagagagaagacaggtgggtgctttgacagtattctctgactatgaaggtcggggaatgagatataccaagcaatctgagcgtcttctgaaaatgctggccgcattgtctgtcctgagccagcagcagctattagggcctaaagaaaccagcatttctgcttgtcccaacaacagttataataaagtggggagacaagtcacacacaggaaaaaacataagaattgatcccacagagtcagcatttctctgatatttgtaagtgaccaaggaccacacctctaagggtatccaattctctatctctaaatgatcatttcacttagattgtatttgttgaggactaatttgtatatgaattaaataatgatgatgctttttcttgaagtatgtgtactttgaaaatcttaggccagcagatgctgccaagtgaataaattattccccagatactaggtacttttacattaacgcatacacctgtagtgtaaagtactgaatgatgctagaaagacctccaaatggttggtcactttctcagagttccctatttgtggtttctatcctggccaaaactgaaaatccttcccttacatccagaaagtttactttctacctccttttaagtcttctgtcttcattcttcattccaaagaaaaggacaccactgtctgacctctttggtaaagctttggtaaaatgtttcataataaaaaaattctttttcctaatgactaacctcaactttatcctgctgtgtgaccagattcaatctagtttctcctaaaagcaggaggaagaagacgggtgattattttgattttttggataggacagaattcagaagccagatttgcccaccttgctaaatatatatcaaatccaggccatttagatacagaggcatgaaatgtcacactggtgatcctttctggagaaaatggcagaaaagctgttgttgcctttacctgcattaggtaaactggctctttttcaaggaagcaggaatcatcaaaaacaggcgtgagctattgcctgttctagacataattttccaaaccagagaattcttcttggtttgctttggactatgtaaataatattccagcttggtgatcacgtcagccatgtcctgagaagatagagctgcttgtttctattcagggaaacattcttgagttttcaggccctggactactcattacctcaatggcaccttttccctgaagagtctggtatcctaggttctgaagctgttatttctctttttagtggaacacattccaaaatattcctggggaatctaatgacctttggtagtaaatcatgttaaatagctgtgttgcagctttcagggatatcattaaggattgttgaacacacctatgtaaactttatcagaggaagcaaaattccttgtgaatcaatgttgagtcattcgttttcatggatccttgatcccactccttgaaaacttatagtttatctctgtttcaggttttagattttagaagccattcttactgttacacacggaatttatgatttcatctattatatatggtatcatgggttcaaggctcccaaatcctagttttactaattccagttagaatttataagtgaataaagaaattagagccatatttttacttttcttttgttttaataaattaaccagtcagtgtcaacaggaagtagctggtaggacaaatgctattttttatgtctctttggtgactggaggatgttggtggctcttggcttttggctgataaggtcaaatgcaggccagtggtcataaggagaaccaggagcaaagtgtagatggatcagtgacagttcatcaactcccatcccattagatgggtcagtcatgttatcttaatttacaaaagacaacttgttactatcattactaatcaataagaagcagacttaaatgccttggaatcatgttttcaaacaataattagaaattaatgtaaaatatggccagtgttaaaatggccaacccaggcaaagaacatacatttaattaatctatagaaatatgcatgcctttggggaccagttgttaaatttgtgacctaataactagaataaagtttgatatagaaaaaacatgtctctgtctagtgaccttatcttgccttagcagagggtgtgcttagtgattccctgagtctttcctgtggtcttattttatgaaaaaccatagaagccatacgaagcgaaggcttttctgggatatgtgcataaaacagtactttaaagctaacctttaaggtaattgcaccaagtagtactttcttataacaccatttagtagcagaacgtgcctagataattctagggtagtaagacctctgggacaccagccacttagagaagataacaggtatagttttttgttttttagggttttttttccaatgcccaagcagaggccactacacccagggatcaaggttatgggatgaggattatattttatcccgtttctatgacattgagctctacaccagggctcttgaatgtgaggcttagtttcagatcacaggcctggaagggggtcaggtcaagctgagcagaccttcaagccgattaacccaagagctgaattgtgttgtctgagggaaggagtcctccctggctgattattttctttacaccctggaaactttgcaaaattttataaccaagaaagaaatcttatcagggccacaagccaagttaattttcttgcttattctgcttcagtgtttgcaaaaactctcttaagaagctggaaaacattttcttttggactaatttagctttttttccatttgacttttatttactcttttcctactctgcttcaatcctgccccaccctttttgcaacatttttattcttaccaaagacatgttcttagagtagaattaaaatggcctctcctactttttgtagttgttgttgttttaaaccatcgaaaatatgttttggtctaccccgtgcatggtatggggatataaagaagtagaagactagttcctgccctcgaggtccaaacaaactaatactgaggtactgttacaaggcagtgtttgatttgttgtctaatgagtggttaaaacagtaactgctttgactctaaaggaaggtaacatcatcagaggcatattaagtcttttcaggaaaaggtgagacttgagtattaccttaaaatcagtgattctcggcaggacgcagtggctcatgcctgtaatcccagcacttttgggaggccaaggtgggtgaatcgcctcaggtcaggagttcgagaccagcctgaccaacatggtaaaaccccatctctactaaaaaaaaaaaaaaaaaaaaaaaatagccaggcgtggtggcgcatacctgtagtcccagctacccaggaggctgaggtaggagaatcacttgaacccaggaggcaaaggttacagtgagtagagagtgtgccactgcactcaagcctgggtgacagagcaagactctgtctcaaaaaaaaaaaaaaaaaaaaaaaaaaaatcagtggttctcaaacctggctgcacttaaggctcatcacaggagcatttataccaatgccaatgccccaccctgaccagttaaatcaaaatctctgccagtagagctgagcatcagtgtttattttatttgtaaagctcccccatgtgattctaatgtgcagccaaggttgggaacctctgccttaaataatagataagattcaggtagtcagaaaggggaggtgctggggtagagtgagctgcagctgaagaacaaacaggaggataggctgcatcgtcagagggcacaggctgggttttgccttgtaacaagagcagagggtttgggcactcattcatttgacaaacctttatttaatcacctcttctctgctagtcactgtgtaactagttgcgctggagattcaagaaaacaaaaacaggtaagagatggttgataccctctggttgttcacagtctacttgaggaaacagataagcatgtaaaccggacttgcagtaagagcacagtgaatgaagtaagtctagaggagatggggggtcctggcactaaggaaggttctctagcgatgaatgaggcagagcatgaggcagagaggagtggccgaggccttcacttgggaaactcttgctattacaaagtgccttctagcgagggctggaaaagctagagtaaggctggttatacttgaaagaaggaagaaaaactcgataaaaatattcacatttatacaatttctcctcaaatcctcatgaagtctggtcttacaaactacaaatgggattatataaattttcaagtgccctagaaagagtaatgaagtaaatgaatcctgactaagcctcacacccgcttgatgaaataaatattatgactctcttatttcaacaaattggaaagaggtctttttttcatataggaggtttatttaaatgaactttctaataatattttcatttctatttaggaggcaccctgaaattatgggatgcttgaggggcgagcctgaagtacctagtaaattgttgacagaaccaatatcactcaagctgctgatccacacttgaatctgtaggcttttctcaaagtcctagttttgcatcttagaagtattgcatcttggaagtatttctttgcatcttggaaatattcaatgtttcctttctggtgataggattctcagtgtccattttatattttcgaagactcaaatatcatcactgtgaagacttccctgacaccagctgtgatccgtccctcttccctctggcccacacttgcacctggcccttgtctctattcttagacttctgagccctgaattatgagccccttgaggtctataactgaatttatctgcataccctcaaatgtaagggcagtgcttgacacttacacagtagatacatttattttgaaagagagagagaaagcaagaaaaagaaatgcactccctgtagctactcgtgaacccagtctgaaggacgaaggactgcttatttagaatcattcttccgcatagaaattgagttttacaatttaaccattcctttaaaatgttagtaattgtcggtttaaaatgttagcatcaaaccttgacaattataagcagatacttaaatagaaatactgtaagaatactgaagataggaatactttttgcagaaccagcctgctgtagtctatgggaggatgggagtcaggcttcccctggaatcttatgggatagcctttgtgtaagcaagccagaaccctaaacacagacccaggctgagggagagaagggttctgcagctgctttcagggaccagatagcatgaggagggtaggaaatctttgttgctatcttctacaagtcttaacttctcctctctgtggttggacaggcttaatgaaagactgaataaccaaagaaaagttgataaattttttttcccagataagctaaagggtagatgtggggcagcatgtcaggcttatattcatattcacccaaagaaagatatcgaggatgatgttttacctgatgtaagtcatagttgtatatctccctactcctagattcctccaaagaaggattcaggcttagttgccctaactcaaaaggaacctctctcccttggtggcatggttccaggtcgctgtacttgttctcttgttttctactccagctcacctgctgtttttaggcaaggaggattatgtgagtatgtgtgtgtgtgactagatcccgccagaggagaagttcggctgtgctgcaggggtagatgaaaactctttttaagcataaatacctatagaaatagcaaagggaacataaaatccagtcaagtacattatcttgggtataaatgtctcctccctttccagagctgctcaagtgtgaaatccaagcccctgcccacactcttgcaacagaagtgctctaacaggtattaagtggattggggaaataaataaaaggggaacccagaatggtggcattaaaagaatcccttttttcaggcaatgtattggcactaggcactaggcaaatgtattaaaatctgaggaaatcctacggaaagtgtgtggtcccagtgaatgaatacaatgagctgctactcacagtgcagggactgagaaagggcaacacagacacccaagtggtcatctcccatttccatctccacatttgagataagaatacctgtatctttcctaccacccacaaacaaacaagcaaaccatgggactccctttgaaaaaagtcaatatatccaagaaatcactatttctgaatgagctcaagtagagagaactttctcttaagagggttccgctggaaattgccagctgaaaatacacaggtacaatgactcccacgctggagatgaagggtcccctttcccatgctttgaccacgatagaccgtgtacctttgctaaggtggagagtcagtctttcctaggagattttgagccaaataaaataaaaacaaaacacgggtgagagaaccaccatgatgttttaaaaggcgaaagatttacgcgatttgaagagaaaccagagtataccaccatgatgttttaaacatcattttttatcaaatatagttacaaaattaaccgttaccaccatttcaaaaaggtaaaggcactttaacaccaaaaagtagaaaggacatatctagaaggaagaatacatgtattgatatatttaaactgaaaacatttctttttatggcagacttagcacatgtccttacttctctctttgaggcgcatgagctctgaccatcacaggacaaatgactggtcctcttacagagcatgtaggtggtttaccctttaatgagccactcatttcactagcattttatcacctctgttgttctcctccagctctgacttattttatttttatatgctgtttgtctggtaccaattccccttgtgcagtgaccctgcctgctctaacttgctaagtaaactaggccaaatacctgggcaggagatttctagagaaatctgagcagttgcaggaagtagaagagacacagggctttggaaccaaattgaagaccctgttgtctggcttgggaagaaaaatattttcagttgggaaacaacatcggaaacagctatgagatctcttggacaaggcgctgccctgaaagtcaaggaccttgaaatttatttggctcatttgagaatgaagattggacaggatgttttattttagccttagctggttagctgtgagtgagaagaaaatgggcaacctcattggctagggaaagtaaaaaggaaagaagggttcaatacctgcctaaactatgaactgatttacaaatgaatcagcactttcactagaacaaaaagcatttagaatatgacagtgcccatctgagatacagtctagagatcatcttctccagtgagtctcaagtacagtaaatttaaaaatcccaggtgtttgtgaacaatgaagatcccaggccccatccccagtgctgtattcagtgagggcagtgccaagcctaggatctgcagtttttagcaagcactttgggtgattcttacatgggtgttcttcagtttcatactccattctagcccctttgttttacagatggcggtaagcaattgatattaactaatttattcagggtcacacaactagtaggtagcagaaatggaacagaaattcaattctttcaattctgaatgtgttgctattttcactttactctggtgacttttagtagatagattctaggcaaaaaagtccccaaacccaatcaaattattgggtttgcaggtgatatatttatatctctcatgactttcagtggtttataaagagctcctaaagaactgtgcaggaaaaaaaaaaaatttaagcaccatctcaccccacattgcaatcaattacaagataaaagtcatcttttaaattcttgaacccaaatctgaatatgtggctttttccaagttaaacttcacagtgagcatgaactccccagtcaagtgactttccttatagacaacatcctgccacagggctggctatgctaccgctctcctacagacagccatttgtgctcatggacatctcccttaaatcctggctccctagtccccatcttcataggctaaaggtgtgtaatgggagaaccaactttgtctgatcttgcgagcatgggagctttttggttatcacatttttgagtcagtcaatctttattttgaaaaagcagggcaggacagagggaggaagagaggctgagggcaggcagcagcctgtgtgggaacccatttcctgccatcctagggtcccatagttgataatggacaacatccttgcttggttcttgtgcaccaggtgatactaatttaaattcctctttattttctagtgatggaaaggagttagcctttactgagtacctatgagtttgcagggatcatttttgaccctttgtgttttatttccatcaattcctccaataacccttcagcatagatctgatcatctctatttttacaaatagaagaacttagctgataacataaataactcatattcagtgatagcatcaatatttgaaaccaagtttgtatagttccagaccctcagttctttttcctgtaccatgtgctctgagatgtaagatggtggttgtgttaccggaaagggatctcaatccagaccccaagagagggttcttggacctcatgcaagaaagaatttggggtgagtccataaagagtctactttgtgccagagttcataaagtgaaagcaagtttattaagaaagtaaaggaataaagtatggctactccacagcacagcaacccgaagagctgctggctcgctatttttatgggttttttttttattatatgctaaacaagaagtggattattcatgagttttcctgtaaagaggtgggcaattcccagaactgggcgttcctcccctttttagaccatatacggtaacttcctgatgttgtcatgccatttgtaaactgtcatgatgttggtgggagtgtcttttaacatgctaatgcattataattagcgtataatgagcagtgaggacaccagagatcatgttcatcatcatcttggattggtgggctttggccaacttctttactgcaacctgctttatcagcaatgtctttgtgacctgtatcttttctgacctcctatctcatgctgtgacttggaatgcctaacctcctgggaatacagaccaataggtctcagccttatttttacagcttgttttcaagacagagtcactctggttcaaatgcctctgacagttatcactgttttaatttaggaataaaatgaggtgctagaaaaggaggccttgacttggtgatgattctgctgggttgcaatgaatggtccttattatcttcctctctgactttcctgaacgatgattagacctagaatgtcatttggtttacctgtaaaacttagtgagttatgtattaggatagcccctcccaccctggggcaggaacatgaaagcagtgagatgaggagcttcttcttgctttttttctcttgctctaggcattatttgactttgaaatactcctggcattttcctgtgattctgaagtgccccttcctctgcttgtgtgtgtgagatttgaaagcttatcacacatgtggctaaagcaggtccagcttggagcattcgtcttctggctgctgttgctgggggagtatccctgctgtgagatgctacgccgcctgagcctgtggcctctgcttatctcctggggtggctgtggctgtgaggtgcacagcatggtacaatgctagttttcatttcaagtcctttcttgatgtcactgatgggtgcaatgagtggagtggggggacctcaggcccttccaaattctttcttttttgttgttgttatttagtttttatttcataatcataaacttaactctgcaatccatctaggcatgggagggaacaaggaaaacatggaacccaaagggaactgcagcgagagcacaaagattctaggatactgcgagcaaacggggtggaggggtgctctcctgagctacggaaggaatggtctggtggttaagataaaacacaagtcaaacttattcgagttgtccacagtcagcaatggtgatcttcttgctggtcttgccattcctggacccaaagcactccatgcctccacaatattcgtgccttctttcactttgccaaagagcacgtgcttgccatccaaccactcagtcttggcagtgcagatgaaaaactgggaaccatttgtgttgggtccagcatttgccatggacaagatgccaggacctgtatgctttaggatgaagttctcattttcaaatttctccgtgtagatggacttgccaccagtgccattatggtgacttcacagtcaccaccctgacacataaaccctggaataattctgtgaaagcaggaaaccttataaccaaatcctttctctccagtgctcggagcacgaaaattttctgctgtctttgggatcttgtctgcaaacagctcgaaggagacatggcccaagggctcgctgtcgacggcaaattcaaagaacatggtggggttgaccatggctaatagtacacggttttcctcagcggtggcgtccgcagagcacccaaattcttaatagcttataaaattaggggtagaggaggttgggtgcggcagctcacgcctgtaatcccagcactttgggaggccgaggcaggtggatcacgaggtcaggagtttgagcccagcctggccaaggtggtgaaaccccgtctctactaaaaatacaaaaattagccaagtatggtggcagacacctgtaatcccagctacttgggaggctgaggcagggaattgcttgaacccgggaggtggaagttgcagtgagccaagatcgcaccactgcactccagcctgggtgacatggcgagtctccatctcaaaaaaaaaaaaaaaaaaattaggggtagaggaatgggaagcagacaaaaggtttacattgtggaggtttgaggagaaatgaatcaaataagtctctagcattctgtttgactttatgttagtctgattatgttaccataacattttatgatatgctacacattatctgatgggtgattaattttcaaatgtaatacaaatcattgagctttcctgatttctgccgctgtaaataatttggaattttcagttactgcaaagttgacatagtcactccttccttcctgtaaccttcaccttaccttgttgtcccctccctgcccccaagcttccctggatttttaaatcagccagtggctcctggcaactgtcttagaatgcttgaagccgaggttttttttcactgagggtctctttctagaagtttctcttcttaccttggcagagcttaagagttcttgcatctcagacaaagactgtgtgtgcttgactgttggacattcattttattgttacaaagggaccatgattttgagaacacctttggagagcccagctcccatggttgtatcccactgcccattttctgaatcctcaactcagaattggcaatgaaagagtgaactgggattatgatctgtgattctctaacagaattctctgagagtcaaactccagaaagaggctcatctttacaaaccttaaagaattagagctaaggcacctggtatgtctgggagggattgaaaacaatccccccaaagccccagcggccctggctctctggttgctatgctgagttgattcatccatttattgagagtctactttgtaccagttattctgctaagtgctttgtgggcattttctttttcaagcctcacgaaaactctgaggtgggtattactagatatactttacaattggagcacattgaacgttatggagtttgaaaattttgctctaaatcacatggttctaaggggcaaagccagaactttccttttcctttgcctctccctcccccatcacatacatacactccctcttttatatccctaggttcttaacctttattctacaatgagtaccatgttcatgtaagattattcatgcatgttacttggaattaattgcagaacaattttttttcaacccctgtggtgtggtcaccttcaatacttatacttggtggaatactcccttcaaagagtggaatgatccattgctttgagagagctttttcgatctctgttaagtaatgattagttatttccttataactgtgtggctctgtgtggcaacagaacacttttgaggaagaataaactctacaggacatggtcttctgaatctcaccattcaatcaggggaagttctggttcttcttctctgttccaagtactagcctttccagccagcaccttttctgtgctctgggtttggcttcagtgttctgtcatttatcgtcaaagaagaaagagaagtctctgtggcatcttgcccacagtggggatggacctgtgctcacctctctcctccagtaagaacctaagggcccaggaggtatagtggtgcctcccatagatacttcccttccctcatggatgatacagaatgacatataaatgatatctatttcttcatttttttccttgcaaagtcacttttccacatactaatccatttcacggtttatctttaaatcctttctcagttgtctattcttctctgaaagtattatcccagcatcctaatgaagattccatcaatgtctagtaaaatgacaaaactctctagcagtactatgttttgtttttggttttggtttgtttgttttgtttttactggtgcctctttataataaaaagatttggtggctccagcacagcttctaacccttcaacagctgtgcctataccaagctgttctctcttatttgtaactatttatgcagtgttctctccagatatactgttccatactgacctgcattggaatgttaggctcttctttgtgactgatctctatttcctacttgtgactccgttctgacactacctttgcctttttataccatcctccctacttttctcatgtagatttgctaaaagatccccatgactccaagatccctgtaactggctctgctgagtctgtcagcatttgatccctttgacttgaggaggccagtccttctcaggaaccacctgtaatctcttttttttccttagagacagggtcttgctgtgtcgcccaggctggaatacagtggcatgatcataactcactgcagccttgaactcctgagctcaagcaattcttccaccttagcctcccaagtagcttggactacaggcacataccaccacacctggctatttttaaaattttatgtagagatggggtcttgctgtgttgcccaggctgggcttgaattcctggtttcatgtaatcctcctgcctcagtcatccaaagggctgagattacaggcatgagccacagcacctggcctatacctataatctcagtttgaattaaacagtagtctctaggacccctctgtgtaggggatcttgttacatgttgtggttgttcaaaggccaagtattttcaaagaaaacccactgagataagttggatgagtgactgccatagcagtcaatatgacacctttgtcactttttttcatatcctaatagtctaatatttttcctcaagaaaaggtatatgctgcggtttgaatgtgtctccaaaacagcatacttaagtagtagtttacttaatggccattataaactattaaaaggtaggacctgtaagaggtgatcagcccatgagggccctgccctcatgaatgattaatgccattatcaagagaagtgggtttgttattgcaggagtaggttctttataagaagacaagttcagcccccatttgtctctctgtcaccctctctttgcccttccaccatgcaatgatgcagcaagaaggccctcaccagatgctggccccttgattttggacttagcccccagaactgtgaaaaataaatttctgttcattgtaaattatctagtctgtggtatttggttataccaggacaaaatggactaagacagaagattggtactaggagtgtggtgattgttataataaatacctgaaaatatggaagtggctttggtattgggtgatgggtaaaggctggaagaatctggagtagcaggctaacaaaagcttagattgctataaatggagtattaacagtaattctggaggactcagaagaagagaatgagaaacttcttagagattacataagtgattgtgatcagaatgttagtagaaatagagacagtaaaggccattctttttctttctttctttctttctttctttctttctttctttcttccttccttccttccttccttccttccttcctttctttctttctttctttctctctttctttctctctttctctctctctctctttctttctttctttttttgtttttgagatggagtttcactcttgttgcctgggctggagtgcaatggcacgatctcggctcaccacaacctccgcctcccaggctcaagcaattctcccacctcagcctcccgagtagctgggattacaggcgcccaccaccacacctggctaattttgtatttttttttttttggtagagacggggtttctctatgttggtcaggctgctttcgaactcccgacctcaggtgatccacccacctcagcctcccaaagtgctgggattacaggcgtgagccaccgggcctggtcagtaaaggccattctgatgaggtatcagacagaagagatgaatatcttattggaaactgaagtaaaggccatgattgttatgaagtggcaaacaacttggttgaattgcatccacgccttgaggtcttgtgaaaagcagaatttaagagcaatgaactaggatatctggtagaagaaattttaaaccatgacatcgaagaactgtgcggcttcttttaactgcatacagtaaaatgagagaagagagaaataatttaaagatgggatctataattaaaagggatctgaaggattctcagcctggttgcctggtagagaaagaaagagagcattttctggagaggaaatgtgtggctaagcaaccatttgataaggagattagtatgaatagaagaaagccagatactattcatcaagacaatgggagaatgaccccgaggggattttggagatttttaaggctgcccctcccatcacaatcccggagctctaggagggcagatggtttccagggacagacccagggtaccatccacaggctgactttccagggccactcaggacgctaccttctgcatcccagaggagcatttctctgccacccagtcatagctcaagcaggcccaggtgtgactcatgttgccactctagaggcacgagtagtaagccttggtggtgcccacatagtgctaattctgcaggcatgcagaatgtatgagctcttaggccatggtagcctccacctagatttgaaaggatatattggatagcctggacatccaggcagaaatttatcacaggggcagagccatggcagagagccccatctagggcaatgcttactggaactgtggggttgcagctgccacagggagtcccctctacacctagtataggtgtcatggcagggtcacttgagactccagaactgcagagcaaccaatgtgcagccccagcctcggacagctgaagcagcaagactaacccgtaagagctgctgtgagggtgagactagcaaagccatggggttggagcttcccaaggtcttctgggtacaacccctgccttagtgtgaacagaaggtggaaatggagtaaaaggaggttattctggagccttatttgaggttgttttccctgttgagttttggactaacttgggatcagttactcctttcttttttatttctcccttttggaatgggaatgtctatcctatgcctttcctatcattgtattttggaggcacataacttgtttaattttataggctcacaactaacagggaatttgctttaggatgaatcatgccttgagtctcactcatatatgatttagatgagactctggactttggacttttaagttgatgctagaatgagttaacactttgcagctattgggatggaataatgtatttatatgtgagaaggacatgaatttggggggctggggccagaatgctatggtttgaacatgtcccaaaaaatacatgtgttggaaacttaatgaccattgtgatagtattaagaggtgggatctttaagaattgatttaggccataagagctcatctgtcatgaatggattaatgctgttattgtgaaagtgagtttgttatcacaggagtgagttccttataaaaatttgagttttgtttctttttcaccttctctttgcccttccaccatgggatgatgcagcaaaaaggccatggcaagatgatgtcctctcaatcttggactttccagcatacaggactatgagaaataaatttctgttcattataaattacccagtctgtggtattcagttatagcagcacaaaatggactaagacaatatgtattacaacttaaaatatttagtaataaatcttctagagactgtaattgtaataataatcctttgtgtgtcctctagccacagacacaatcctcttctaactcttccaatttttttgcattttaaattttttttaatttttactttttattgtggtaagaccacttaacatgagatctatccttttgacaaacagtctaagaacacagtaccttattaactgtatgcacattgtcatacagcagatgtctggaacttattcgcattgcataactgaaacggtgtatccattgaaagagaactccccattttccacttctcccaatccctggaaatcatcattcatcattctactctgtttctatctttttgactattttagatacctcgtaagtggactcatataatattcgttttctatgactggcttatgtcacctagcataatgtcccccaggttcatccatgttgcatatggcaggattttctttatatatatatatatatatatatatatatatatatatatatatatatatatatatataattattatactttaagttctagggtacatgtgcacaaggtgcaggtttgttacatatgtatacatgtgccatgttggtgtgctgcacccattaactcgtcatttacattaggtatatctcctaatgctgtccctccccactccccccaccccacgacaggccccagtgtgtgatcttccccttcctgtgtccaagtgttctccttgttcaattcccactatgagtgagaacatgcagtgtttggttttttgtccttgcgatagtttgctgagcatgatggtttccagcttcatccatgtccctacaaaggacatgaactcatcattttttatggctgcgtagtattccacggtgtatatgtgccacattttcttaatccagtctatcattgatggacatttgggttggttccaagtctttgctattgtgtatagtgctgcaataaacatacgtgtacatgtgtctttatagcaccatgatttataatcctttgggtatatacccagtaatgggatggctgggtcaaatggtatatctagttctagatccttgaggaatcgccacactgacttccacaatggttgaactagtttacagtcccaccaacagtgtaaaagtgttcctatttctccacatcctctccagcacctgttgtttcctgactttttaatgatcgccattctaactggtgtgagatggtatctcattgtgattttgatttgcatttctctgatggccagtggtaatgagcattttttcacgtgtctgttggctgcataaatgtcttcttttgaaaagtgtctgttcatatcctttgcccactttttgatggggtttttttcctgtaaatttgtttgagttctttgtagattgtggatattagccctttgtcagatgagtagattgcaaaaattttctcccattctgtaggttgcctgttcactctgatggtagtttcttttgctgtgcagaagctctttagtttaattagatcccatttgtcaattttggcttttgtggcccttgcttttggtttttagacatgaagtccttacccatgcctatgtcctgaatggtattgcctaggttttcttctagggtttttatggttttaggtccaacatgtaagtctttaatccatcttgaattaatttttgtacaaggtgtatggaagggatccagtttcagctttctacatatggccagccagttttcccagcaccgtttattaaatagggaatcctttccccatttcttgattttgtcaggtttgtcaaagatcagatggttgtagatgtgtggtattatttctgagggctctgttccgttccattggtctatatctctgttttggtaccagtaccatgctgttttggttactgtagctttgtggtatagtttgaagtcaggtagggtgatgcctccagctgtgttcttttggcttaggattgtcttggcaatgtgggctcttttttggttccatatgaactgtaaagtagttttttccaattctgtgaagaaagtcatcggtagctttatggggatggcattgaatctataaattaccttgggcagtatggccattttcacgatactgattcttcctatccatgagcatggaatgttcttccatttgtttgtgtcctcttttatttcattgaccagtggtttgtagttctccttgaagaggtccttcacatcccttggaagttggattcctaggtattttattctctttgaagcaattgtgaatgggaattcactcaggatttgactctcggtttgtctgttattggtgtataagaatgcttgtgatttttgcacattgattttgtatcctgagactttgctgaagttgcttatcagcttaaggagattttaggctgagacgatggggttttctacatatacaatcatatatcatctgcaaacagggacaattttacttcctcttttcctaattgaataccctttatttctttctcctgcctgattgccctggccagaacttccaacactatgttgaataggagtggtgagagagggcatccctgtcttgtgccagttttcaaagggaatgcttccagtttttgcccattcagtatgatattggctgtgggtttgtcataaatagctcttattattttgagatatgtcccatcaatacctaatttattgagagtttttagcatgaagggctgttgaattttgtcaagggccttttctgcatctaccgatataatcatgtggtttttgtctttggttctgtttatatgctggattacgtttattgatttttgtatgttgaaccagccttgcatcctagggatgaagcccacttgatcatggtggataagctttttgatgtgctgctggattcagtttgccagtattttattgaggatttttgcatcgatgttcatcagggatattggtctaaaattctctttttttgttgtgtctctgccaggctttggtatgtggatgatgctggcctcataaaatgagttagggaggattccctctttttctattgattggaatagtttcagaaggaatggtaccagctccttcttgtacctctggtagaattcggctgtgaatccatctggtcctggactttttttggttggtaggctattaattgttgcctcaatttcagagcctgttattagtctattcagggattcaacttcttcctggtttagtcttgggagggtgtatgtgtccagaaattcatccatttcttctagattttctagtttatttgcacagaggtgtttatagtattctctgatggtagtttgtatttctgtgggatcagtggtgatatcccctttatcattttttattgcatctatttgattcttctctcttttcttctttattagtcttgctagtggtctatcaattttgttgatcttttcaaaaaaccagctcctggattcattgattttttgaagggttttttatgtctctatctctttcagttctgctccgatcttagttatttcttgccttctgctagcttttgaatgtgttgttcttgcttctctagttcttttaattgtgatgttagggtgtcaattttagatctttcctgctttctcttgcgggcatttagtgctataaatttccctctacaccctgctttaaatgtgtcccagagattctggtatgttgtgtctttgttctcactggtttcaaagaacatctttatttctgccttcatttcgttatgtacccagtagtcattcagcagcaggttgttcagtttccatgtagttgagcggttttgagtgagtttcttaatcctgagttctagtttgattgcactgtggtctgagagacagtttgttataatttctgttcttttacatttactgagaagtgctttacttccaactatgtggtcaattttggaataagtatgatgtggtgctaagaagaatgtatattctgttgatttggggtggagagttctatagatgtctattaggtccacttggtgcagagctgagttcaattcctggatatcctagttaactttctgtctcattgatctgtctaatgttgacagtggggtgttaaagtctcccattattattgtgtgggcgtctaagtccctttgtagttctctaaggactcgctttatgaatctgggtgctcctgtattgggtgcatatatatttaggatagttagctcttcttgttgaattgatccctttaccattatgtaatgaccttctttgtctcttttgatctttgttggttgaaagtctgttttatcagagactaggattgcaactcctgcctttttttgttttccatttgcttggtagatcttcctccatccctttattttgagcctatgtgtgtctctgcatgtgagatgggtcttctgaatacagcacactgataggtcttgactctttatccaacttgccagtctgtgtcttttaattggagcatttagcccatttacatttaaggttaatattgttatgtgtgaatttgatcctgtcattatgttagctggttattttgctcattagttgatgcagtttcttcctggcatcgatggtctttacaatttggcgtgcttttgcagtggctggtaccagttattcctttccatgtttagtgtttccttcaggagctcttttagggcaggcctggtggtgacaaaatctctcagcatttgcttgtctgtaaagtattttatttttccttcacttatgaagcttagtttggctggatatgaaattctgggctgaaaattctttctttaagaatgttgaatattggcccccactctcttctagcttgtagagtttctgctgagagatcagctgttagtttgatgggcttccctttgtgggtaacctgacctttctctctggctgcccttaacattttttcctttatttcaactttggtgaatctgacaattatgtgtcttggagttgctcttcttgaggagtatctttgtggcgttctctgtatttcctgaattgaatgttggcctgccttgctaggttggagaagttctcctgggtaatatcctgcagagtgttttccaacttggttccattctccccatcactttcaggtacaccaatcagacgtagatttggtcttttcacatagtcccatatttcttggaggctttgttcatttctttttattcttttttctctaaacttctcttcttgctttatttcattcatttgatcttcaatcgctgataccctttcttccagttgatcgactcggctcctgaagcttatgcattcatcacgtagttctcatgccatggttctcagctccatcaggtcatttaaggacttctctacactggttattctagttagccattcgtctaatcttttttcaaggtttttagcttctttgcgatgggcttgaacttcctcctttagctcggagaagtttgatcatctgaagccttcttctctcaactcgtcaaggtcattctccgtccagctttgttccattgctggcgaggagctgcgttcctttggagggggagaggcactctgatttttagaattttcagcttttctgctctgttttttccccatctttgtggttttatctacttttggtctttgatgatggtgatgtacagatggggttttggtgtggatgttctttctgtttgttagttttccttctaacaggaccctcagctgtaggtctgttggtgtttgctggatgtccactccagaccctgtttgcctgggtatctgcagcggaggctgcagaacactgaatattgctaaacagcaaatgttgctgcctcatcgttcctctggaagcttcgtctcacaggggtacctggccatgtgaagtgtcagtctgcccctacttgggggtgcctcccagttaagctactcgggggtcagggacccacttgaggaggcagtctgtctgttctcagatctcaaactctgtgctgggagaaccactactctcttcaaaactgtcagacagggacatttaagtctgcagaggtttctgctgccttttgttcagctatgtcctgccccccagaggtggagtctacagaagcaggcaggcctccttgagctgctgtgggctccacccagtttgagcttccccgccactttgtttacctattcaagcctcagcaatggcaggtgcctctcccccagcctcgctgctgccttgcagttcaatctcagactgttgtgctagcaatgagcgaggctccatgggcatgggatcctccaagccaggcgtgcgttataatctcctggtgtgtcatttgctaagaccattggaaaagcgcagtattagggtgagagtgacctgattttccaggtgctgtcggtcacagcttcccttggctaggaaagagaattccctgaccccttgcacttcccgggtgaggcgatgcctcgccctgcttcagcttatgctcggtgggctgcacccactgtcctgcacccactgtctgacaagccccggtgagatgaacccggtacctgagttggaaatgcagaaatcacccgtcttctgcattgctcatgctgggagctgtagactggagctgttcctattcagccatcttggaaccgccccaccacattttctttatccatttatttgttgatacacctttagattgtttccataccttggctattgtaaataatgctacaatgaacatgggtgtgctgatatctctttgggataagtttacaagttttaaaatataatttcaacttttattttagattcaggaacatatgtgcaggtttgttacatgggtatgttacgagatgctgaagtttgaggtgcgaataatcccatcacccgggtagtaagcatagtaccccataggtgttgttttaaaccctttcccccatcctcctcttccccatctagttcccagtgtctattattctcatctttatgtccatgggtaccctgtacttagctcccacttataagtgagaacatgcggtatttggttttctggtcctatgttaattcacttaggataatggcctccagctgcatccatgttgctgcaaacgatatgacttcattcttttttatggctgtatatgtaccgcattttctttatccagtccaccattgatgggcacctaggttgattccatgtctttactattgtgaatagtgctgcaatgaacatctaagtacatgtggtttttggttttttttttttttttttgggagaacaatttattttcctttgggtatatacccagcaatgggattgctaagtcaaatgatagtttttaagttctttgcaaaatctccaaactgctttctacagtggctgaactatctacattcccaccaacagtgtatgagcattttcttctctccacagcctcaccagcatctgttgctttttaactttttaataaagccattctgactggtgtgagatggtatctcattgtggttttgatttacatttctctgatgattagtaattttgagcattttttcatgtatttgttggctacctgtgtatcttcttttgggaactgtctgttcatgtattttgcccattttttaatggggttatttattttttgcttgttgaattgtttaagttccttatagattctggatattagacctttgtcagatgcatagtttgtaaatattttctccaattctgtaggttgtctgtttactctgttgttagtttcttttgctgttcagaagctctttaattaggttttgtttgtcaatttttgtttttgttccatttgcttttgagggcttagtcaaaaattctttctcaaggccaacatcagaatggtatttcctagattttcttctaggattcttatagtttgagggcctacatttaagcatttaatccaccttgagttaatttttatatatggtaaaatgtaggggtctagttttattcttctgcctatggctacccagctatcccagcaccatgtattgactagggagtcttttccccattgcttatttttctcaactttgctgaagatcagatgactgtaggtgtgcagctttatttctgaattctctattctgttccattggtctgtatgtctatttttgtagcagtagcatggcgtttgggttactgtagcattatagtatagtttaaagtcaggtaatgtgatgcttctggctttattatttctgcttaggattgctttgtctattcaggctgctttttggttccatgtgaattttaggacagttttttgtaattctgtgaagaattatgttggtagtttgataggaattgtgttgaatctgcaggtttctttgcacagtatggccattttaatgatattgattattctaatccatgaacatggaatgtgttttggcggggggatcctctctgatttcttttagcagttacttgtagttctccttgttgagatatttcacttccctagtttgatgtattcctaggtgttttttgttgttgtgactactgtaaatgggattgtgttcttgatttggctctgagcttgaacattattggtgtataggaatgctactaattttctgtacattgattttgtatcctgaaacttactgaagtcatttatcagctgtaggaggctttagtggagtctttagggttttctcagtatatgatcatattgtcagtaaagagggataatttgacttattgttttcttacttggatccctattatttctttcttttgcctgactgctctggctaggacttccagtactatgttgaataggagtggtgagagtgggcatctttgtcctattcctgttcttaaagagaatgcttctaacttttgcccattcagtatgatgttggctgtgggtttgttatagatgactctattttgagatatgttacttatatgcctaatttgttgaggattttttcatgaaggaatatggattttctcagaagcttccgcatctattgagatgatcatatggtttttctcttgaattctgtttatgtgatgaatcataaatatcgatttgcatatgttgaaccaaccttgcacctcagaaatgaagcttacttgatcgtggtgaattaacttttttatgtactactggatttggtttcctactgttttgttgaggatttttacacatatgtccatcagggcctgaagttttcctttttcattgtgtctttgccagattttggcttcaggctgatgctagctttgtagaacgtaactcttctatttttatctagacaagacaactaagtgttctttatgttgaacacctcccctttccctccattcctgcctcattttttcatccttcatatcctttctgggtacatatgtgtgccaaatgctgggaaaagtaagtcaaataaagctcagtttccttctatgaagagccatagtagtagaggagaatacccagtgttaatagagggaagcatacaggcaaataaatataagaaggaattgaaggaattgtggaagaggacagtgtagctatcgttgttgggatggtcagaacactcacaaggaagtgatggccagagaaggattcagaagagggtgtgatactggaaacaaaacttgaaaagtgcattggtatttgcttgatagatgaagtaggagactgaggaagatgtttgaacaaaggctctgaggtgggaactacaaatggtccttctttagtgctacaggggagcactaaatgtgtctgtacaatgagtagggatcggggaggatggggcctgtatgtagttaaagataaagtaaggaaaggaaagacaaaccagactcagtcctgcaggttttcagaagccccactaaggaacttccagcaagcctgcgacatcagatttgtaccttccaagtctccctttggcaagagttttccatacagatttggagggatttgaaataagatgcaaagaaatgagggcctgaaccaagacagtggatattgagagggaaaagagggaagagttatgagatggttaggaggcaggatccacaacatttaagcacaaagaggagatctggaagggtgtgggaagggggttgttcctgaggcaaatgagtgagtggatgaggttttactcactgaaacaggctggtaaaggagaaaaaggaggcctgggagggaggcaagagctggccctgcttggaacatgcgttgtttcctgcttacgtggacagtgtatggctgcttccattcttccatccaggcctcaatgactgccatcaagaattaggttggagatcagaaatgatttcttataattgcacagaatctttagtcaacattttgtcttcccctgcctcccaccactgtttatagcacatcatgtcatctccactctcaatgccatttccttatttcggatccctggcttctgtatagagacaatggttatcagagtgtgggaaaaatgaaaagttaagagacgccttctgcagaaagggaagatgcaaactattttcagtaaagcgcctgagctgagagaggagagggccctatggagagctatgtctccctctccactgaattctagcaaatgtaaagtccaggggagtggcatcagtagctaatttgcagaaataccagtacaggcttcaaagttttctgaaagacccacatctgcaaattgggaatcaggaatccttgctttcgtggatcatgccagtcagtggattgtttgctctcagatccgctccctgcccttcccctgctctacttgataccacagggaactgacctttacaatttgcatttcccagtctccctttccattgagtctggttagtttggagaggagggatgaagggcagaagtatgagagaagccatgtatttttgtacacacacacacacacacacacacacacacacactctctcacacacacattcctctgccttgcttccagtggtgtcccaggcagtgacattagttcctctccacgatccctttgctgtccccactctagttgggcagctccagcctctgggctctagtaacagcatctcatccttgattcctccagccctggggatggtggtagcttcttgttgttgctaatctctgggttgactcattgtcccctattttcatttcagctcttctaacacatttgtaactaattccccaaattgaatgctctctcttgaactaccaggatatgtcccattttactgatggaccttgacagatacaggtctacataagcaccctggttggtacatggttaatataagacccccaatctcttctccattgtccctgttcccccaaaggactcttctgtctaccatggttctccatccctcagagttgggctcctggcctggactgtcttgaagggcaaacatttgtgctgtgcttcctgaatggcatgagaaaaggagctcttttggcctagcctccttcctgtaggattttccaaaactttccagatgtatctaagctcaggaaacattttaatggctggaaataatgtctcatgggggttgggggtttgaaaccaacagaaccttctccaaaagaggtgtgttgaaatgttccagggtctgtatgcacacatccaaaccctgcccctcccctgttgaaagcatggcaggctcccaccctttaattggttcatgtcgtagaagagttggcattctctgaatgccctaatgacatggagcagaggaacagctccaaaggccagaactctctccaggagggaaaggattattaagcggttagtgatgcatttggattctaattcagattccacctcagattctgtaaagagactcctataaccctcttcttttggccttatttggctagtaataatggttgtaagattgatctaaatcataataaatgttgtctaaggctgctcttactgacttaatgaattggagcattctgagttttttgtgaggataggcattatccaactgcagaatacatattgattctttttcaaacaggctgtggcttttactttgcaatgttgcccacatttcatgacaactttcagaacaaactctgttgagggatgaagattattgctatctgaatgcattcatcaaagaaaagtagaagtggaagaactatacttctgccttctcatattcttcagcattgggccaagagtagaaagtaaccatcatttcagccaggcacagtggctcacgcttgtaatcccagcactctgggaggccaaggcaggtggatcacctgaggtcacgagttcgagaccagcctggccaacatggtgaaaccccgtctctactaaaaaatacaaaaattagttgggcatggtggcggacacctgtaatcccaggtacttgggaggctgaggcaagagaatcacttgaacctgggaggtggaggttgcagtgaggcaagatcgtgccattgcattccagcctgggcaacaagagcgaaactccatctcaaaaaaaaaagaaagaaagaaagaaagaaagtaaccatcatttctagtctgtggggatcaaactccagaaattgctaaattattgcatgttctaatactacagggaacagctgaaacctcatccttttgagaactggacttgaatccaagccaatattgatttatttgggatgtgtcttgcaagtccacaaatgctttaacacagtaatcactaaccaggatacttatgtagttgtttgatgactcatagaactttatagaccttggggtcagatatatgttttatatgaaaagagcaagattttaatgaaaaggaagtaggtcatgtgcaacaatgtaactacagtttctgtgtctctgaagtgttcagttttgtatgacattgttagttctttcttctgaccaagtttccttcattagcctacaagggagcctatgaagtgaattcacagcaccagaaataacatgagaagaccataattttttaattatttcagagattaagattaatttaggccaggcacggtggctcacgcctgtaatcccagcactttgggaggccgaggtgggtggatcacgaggtcaggagatcaagaccatcctggctaacacggtgaaaccccgtctctagtaaaaaaacaaaaaattagccgggcgcggtggcaggcacctgtagtcccagctactcgggaagctgaggcaggagaatggagtgaacccgggaggaggagtttgcaatgagccaagatggcgccactgcactccagcctgggcgacagagcaagactccatctcaaaaaaaaaaaaaaaaaaaaaaagattaatttatggattctagtatataacatacatacataaactactgtcttcatatgtgggtacctggaaaaatttttccattgcaaaaaagataatgttattctaaagtaaaattctagctctgtttctaattagatatgtgatcttggacaaatgactctgagtcacaggttccccttctataagagaatttcatgatctagaagatgatttcactttctggttctatgaagaagaagcaatgccatgctatacctcagttactattttatacagtgggaaaagtctcattatcaacgggcgctggccacattgtttgtgctaaaccataggatataaccctaacactctgctcagttatttatttggctgacgacttcctcttgtaatacttcttgacaggtggtcagaggaatacctcttggaatccactggcagagcttgttaaaaattcagattcctggacttcccagactaaatcagcagctttgggggtgggtctagaaatctgcatttctacattgctgggcaattcttaaagatacaaagtctgagatccatggccagtcaacagcacgtagtgttaatatattctatgatgtgaattactttaactctctttactctgcgtccagtctgcagggtcttagcccagggcctactactgactggatgatttggtcacaacctttctctctctaggactgttttcttatttatgaaatatggggtctggagtattagtctctaaggaatctttgtgttctaacagttcatgaaaatagttctctagcagcatctgagagagttactgaaactaccttaacaaatcctatttcttgagtgcctactatgtagtaggcattgtgctttttttttttttttttttttttttagctagagtctcgctctgttgctaggctggagagcagtggcgcgatttcagctcactgcaacctccgcctcctgggttcaagctattctcctaccttagcctcctgagtagctgggactacaggtgcatgccaccatgcccagctaatttttgtatttttagtagacatggggtttcaccatgttggccagcatggtctcaatctcttgagcttgtgatccgcccgcctcggcctcccaaagtgctgggattacaggcatgagccactacacccggccggtgcagcttttatgtatgtttcatttattctttatgctaacctgtgatattattattattattattattattcacacttaacacttaaggaagtggaggctgtgaaaagttaagtaacttgtccaagccgacttaatcaataagaggagctgcagtaaagtggaatgaaactggggctgtgaacacctaaagaatgacccaggttgttgctccccctgaaacttcacaaggcctgggcctcatgcagtgcactgctcattcaccctgtgttccactctcccagcaaaggagtcctggttttggtttctttcgatgtttacttggcctcttgcttaagcatttgcctttcctcctcaataacagtgaaaggactgaaaaataataaaataaagaaaagaaaatcccagggctggaaacattttgtttcctacaaaaagaatattttgcggccagctctgtggttgaaagtatttttcctgtggtctagggatgagttggatcccatctcttcttggccagggtctgagaacttagcctgtggcttcccatcgagtcagcacatagcatgctattttttgaacgagtgtctgatgatgttgaatgtgttcacgagtggacgaataggtctgtttgggtgtataagaaatgtgcgcatgtgcctctgactcttccagggcagaaggaacctgggagtggttttccacatgctatacatatcaacgtagcttttaagttttcatcactcacatgatgaccaaaaaaattcagatgctgacaaatgagaggagggtgatatgtgagccttatgtggatttgcaagtaatcagaaagccagggaatctaagattccctatcacatttctttccattttcaaatggaaaatgtcacatttctttccatttttcaaatgctcaaaaccaagacatggggttggttttattatggcagggtggtctgatggtaatgcagaagatgggaattctgagagctgccccagcttgtccaccttcagcctttgggacaccaactttgcctagccttgaataagtcactttttctcaaggactgcattttcctatatgaaaacatgaatttgtgtttaaaaaaaaaaaacaaaactttctgctttcaagaataaaagcttctctagtgagggatgaattttgaatattcaaaccgaattcatggataagaaatagtagtgctaggtaccttttctttactcataaagcattatgtactcatatttgtatgcttccagtatgactttgaagtgtatattagtgcctagaacttttcagcctgttctccatggcatggccttcatgattctatctcttacattcttgtaaagaatgaagaacgggtgttctctggactctcattgcacatggttttatgttcagttacctgctgactgcctccctgtcatgccagctgcaagtcacagcacagtgcctggcacagagcagatgcccaacttgtatttgttgacttaaataaaacttctccaaagatgacaagctactgtttgtaacttcagtattctcttgtgcgaagtcctctacatagctctccattcagggacatttctagagctcaaatcatcatgacttccaggaagaaaagttgtagtcactggattagggggcattgtttgaggaaataagcaaattccacaggtggaaagaattgtgaattgtgtgtgtgtgtgtgtgtgtgtgtgtgtgttttgaggtgaaagaggtttagggaaaatttgaaaagctattggaatggaaattaaaccatccagagtgttttattttagagggatagggtttaagatagactcagcagtggtggcattggccacagggctgcacctaccctgggatgcagaaactggcccatccaagtcagctccatgggaaagaatgaccacaaagtgatcaggggtcaccagtgagaaaaactggcatttgctgtattttgtcacacaggacagtagaactgttctcacagtaggagcagggatggggtggaggtggtggtggtgattttagtaaaccagttttctggtgatgggggggcatatttctgtttttaccccttaataatgagacagcaacccaaataacagatccctcagtacactgaaatgccaaggctaaatgaactggtggaactttgtggctttggctcttggcccacaggcatatccgtgcattagagccatggcttggcagtagacaaagcagctgtgtgggtcctcggggagctctctggctctgtggctttctttgatatgcaactgaactttggcaaatttttcctctcatggcactgtttatgaggtccagagaccttcattatggaacccaatgccaacagcaaactagaactacaggatgtcttcccacattcacactctgcttgcaggctgaagagttagcccacaaggctttcaacaaagggacaatttaggggaagagactgcagaattctcttctcagcttcacatggctgtaaacccataggattggccagacctcttaaactttctttccttcagaaggaaaagatctcttacttaaaaatgattctgtataagattactaatttactgatttccaattcaatagtatttaaaaacaacaacgacagtaacaataatagctagcattcatcaagtacttgaccatttgctaagtactaaagtgctgtgcatgtattaataaaaatgcatttattatcaacatctttgtaaggtaagtactattatccccattttatacatgaagaaactcaatcccaaagagattaattgttagttgttattggtcttaataattattcaccaatttaaggtataatcctgcagatatagcttataattgactggctttcctgaaccccaccttcctcagtctatgacactgggccacagatactaaaataattaaaattatcattcttaattgttaacccacctcaaactgtaactgggtcttgatgagtttcaagtagtatcatccttatattgggaaatctataattaagacttttctaaagtcatgagcaggtatacagaaagtgattgacttggtgaatgagagggatcaactatcctccagagcttgtacagtagagtggaaacaaatgtggtgttggactgagaacggtttaaggtattggaggcaatgattctgttcaagtgccaagattaaaccaatagactctagaggggctcaaaagtgaggctacatgtcatggtttgacgtctaaattatagctatgcaactttctttcctacccatttctactgtatcctctgtgctttctataatagccgctccagggaatgctgataataacattatcggctgccatttttatgccaggcacatgataagagctatacaaacatcatctttataatatgctgtgaggtgggtttttacaataacactgtgaagtgggtattactaccctgaatttacagatggaagaaatgggctatggagattatgaagtgctctgaagttaaaacaactagtaaatggtagaaaagagactctgaagtgacttgtagctactagtttgtcttgcctcataaacaatgtgatagacatctggtatttctgcttgcccttgatctcttaccccttctctcatacctacactatgattttcctgtaaggaaacatgcctcttcaatttttttcagcctatgttgtctagttagagctgagggctgattgtacccactgggttcatgtctgaccaatggaaggatcacatttcctttctacagagattggtttgcaatagttggttaacccaagctaagttgaatagagtaagcccagaattttgctgaacaataagagttgctaaattggtaggatataagcctggagctccttgtggctgtctttgccaccatatgaaggaactcacctcagaatgacaataaatcaacgtagagaaaaacaagagattgagagaatgttccaggtggaaggaggaattgaataattgaattaatataagattatgaggccatcatctgaggccctggatccaactgtgcctcaggtcagttactcctgacattccagttaagtgagccaataaattcccttttttgtttggtctcaatcacatctctgttacttgcaacagaaagaatactaaataatacacatattaagctgggtgcggtggctcatgcctgtaatcccagcactttaggaggccgaggcgggcggatcacctgcagtcaggagttcgagaccagcctgaccaacgtggtctactaaacccatctctactaaaaatacaaaattagccgggcgtggtggcacatgcctgtaattccagctactcgggaggctgaggcaggagaatcacttgacccaggaggcagaggttgtggtgagccaggattgtgctactgcactccagcctgggcaacaagagtgaaactccatctcaataaaaataataataataatacacatattagatcctcatagttacatacaaatgtgggccagaaaattctaataatgagaacctgtattgttaagttaaagagtttattcccccattaagtagagataatttctgattacttaggtctactttcctggttcctatattattccattccttttcttttcctcttccatcttatgcatttgctgttcttcttcctagtttccttttggcctttttattattcacctccaccacagtagagagaaaaaaaaaaagcatgaaacttacaataaacagcttttctggcttataaggctctttgaaaagtttcagatgaagagtaagttaaaaaatattaactaaaaagcattaaacttacaataaacagcttttctggcttataaggctctttgaaaagtttcagatgaagagtaagttaaaaaatattaacttaaaagcaattacgaaatcatttttgggttttagttagccattctatccatgacctttttttttttaaaccacatattaagcttgatgaaagtccttgatgtcattgcttccacgacaaaaatacaaccttttctgggttagtttcccttaatcattaatgatgagctgtaaaatattctttccagttcaaaagtggcatcaaataagtaactaagatgaaattagtaataattttggaaatgtggtcatttagcaagctgatatttactgaacatctactgtgtactaggttaggctctggaaaaagcaaagatgaataaaacataattttcaaaatctagctggatcggcaagtctgaattgggagtgagcaggaggggcagaggtgagggctgagcctggagcagccagttggcccatactgaggaggaccttccaaaggctttggaaagtagatactatagggagctgaggatggtcttcaagaagtgaaaaatgtgctaatccactggggagagcttacgggttatatacaagggtgttatttgtctgacagagaaaactcactttaagattacatgaatatatgatccatatagtctaccaggacatctcttttatatattgaccagaataatctgagaaagctggaagtacaggcatttaagccactaaagctgtggactacagttcaccctaagcaaggaagcgagtgttttttaacatgtcatctcctggattcccgaggctttctgggttagctcaaacctgggccatttagcttcttatgggcagggacctcatcatgttcatctttgctttccctaatgtctaagccagtacttggaacataggaggtactcagtaaatatttgttgaattaatataacattaaataaatcattcagttctgagtagtcattgtttatacttgctgtaaatatggttttatgtaatttccaagtgtgtctgccctttttaggtcctgtattttcattttggcatagtctgctttcagtggcacccagctagaatttgcctgctaaacagaaaatctctggtgacaccgaattgcatatcctggcttgattgctgatggagaatggcagagcacacactcttatctttagcttgactttccatgtataagagaggggatgtttttgtttgtttattctgaaatggaaaacaaaaaagtaatgcatgctagttgtgaaaaaaaaatcaagcaatatagtaggagggaaaatcctctaatggtatataatcttctaggctttttctatgcatatatcaaaatatttatgtactcaccatatataatgttatataaactactttaaaattaatccacacattatggataatttttcatgtaaatatacatattactaaccgtttttcatagcagcatagtattcatggtatggatatacaggaatgcagttaagaggataacataaaaatgaacgaaatgttgtgttccttaaaaactcatatcaggaaaatctaaagtattttcatttctaattatttttaaaaaacaacaaaactttgtttcaaaccaaagaggtagcaatatagcttcatttcagaaattgctaactccgtgcatgaatattgtagccgtgctttgcttcatcattaaccttctctaattcttctacctagggaccccaaagagcatggtaaacattttacaaagtctccttaaagatgctggtctggactgaatggatctttaaatctaactgtttttaaatgtcttttagtaaggcccaccttaattgagcttttttcttaagatcctgattttaaaggggtggatggctcagaaaactgctccagatcaccaaataaaaaatcaagttctgaacagtgagacacctttaggcccatccccccagctgtccccaagatcacactccttcatcatgtgtctcctgagagtcagagatcctgcagctgtgcctgaggaggactgaggtctccaggctcttgtattgctaaacctagtttttgtttttgttttgtttccattctcttttttcttgcctttttttcctctgtggtgtctcatttctcctagagtcccggctgactcccctggggatgaatctgcctgcctgtgcatacaggaatccacagtgtcattagggtagttatctctaatttattcttcctccttgtgattagaagaactcggtctgaatattgaagaaaactcatgtgggctcttgtctttgtgataaaagcttctgtcccatagtaattaggcagagctctagtttacttctaaaacatgattaactccttggaaaggaggggaaaaaacggaaagttatttaagatgggtaccctaggggaacaaaggagaggcttttcccattgttatgcctcctaattaggccaagcccaaggttgctgtgtgtcattccaggaggcagtggcctgcctggtaggcggataggagcagaggggtgacagaatgaagctgacatcagaaaggcccaaaaagagcttagggctttttttttttttttttttttttttttttaagatggagtttcactcttgttacccagactggagtgcaatggcacgatctctgctcactgcaacgtccacctcccgggttcaaacatttcttctgcctcagcgtctcgagtagctgggaatacccaagtgcaccaccacacccagctaatttttgtatttttagtagagacggggtttcgccctgttgaccaggctggtctcgaactcctgacctcaggtgatccacccgccttggccgcccgaagtgctgggattataggcgtgaaccaccacgcctggccaggactttttaaaagactatatcttctgaacttgcctcctgttccacctctgaagggccctcggggagagacggagcttagataccacactctgttctgtagttcctcacatagtttttctcactcagaaccactgaaagaggttaggttgctttattcctcatgactctctgttttgcttgacttgtttatggtgaacatgtggtatttacataatcagaaaaacataaagccatattcatagtgtaccaaccgggaaagagagagaaaaattaattgtttgttgggactggcaaatagtctcacagtgtagtcaagtcaacattaacagtaagaagggtatatgggattatgaaactgtaaaaggcccctgaggattctgagcagagttcattcttagcatgactgtgggggctcagtgccaggccatgctgcaccccacagagggccctgtccagacttctcagcacagggaatgcctcatattggacagtttttgactcctgtgatggtcagtattctcagcttcagggccctctgtttcaggcaagataacctattcactcattctatagaatgctcagcctgatggtatgtgtgttaagtaggtagactgcctggaaacacagattgagcaccaacaaatgattctaatgagaattttagaattttaaactccttatatatccagtctggttgctatcaagctcttcctaccaagttctttctgagatccttctggtgcctatacctgtttcttgaattatttcagtctgtgagcttatttctatgaattaaagataccttaattcccttataatagttgataagtgagtcattctatggttatatatagtgtaagatttagaaacattcacattaaaaatattgaaaatacaaaagacgaagctgacaggttcctggttataccctgacagcactggggagagttattgtataaagttctagctctcctccatcttactgaaactaatttcgtttgtgcttaaaggaaaagacaggaagggtgccctgttgtctctctgttacactcttcaactcatctgaaatcctgtcttgtgttttcttcttgtcctttgcccttgcatttgctggaggaggactttagggaaatagtaagaatgctgcggtaacagagagaattaatttgaccgtgctctgaagaaagagcatgttgatttctcactagaattggttcctccacccatcagagcagggccagggatgtggtacattacacaaaccagtcccatttgaccagctgtttttggatgtgtcaagcccagatttcagcccctttacatagaaacatgttgccttccttgaatgggttcctgtgagactaaagaaagtcccgtgtggtccaagcatgatgtaacagggatgtgtgcttcagaattcaagacacaccctctgagttcctggcatctttttactatagtaatcacacagccatagtcttccttctgtgacccttgaaggccagagctgccttgcctctgctgcattttctaatgggcctggacaggaggacccagctctgtttcttatgggtcttgtggatggcgctgggaaatcaggcttgcctaactggatatacagagcttagcattaacagctggacagagctcttgtgcatcttgttttttttggttatttaaatactcctgatttagggtggagaaagggaatggatttctgttgcttgaaattccttgcgacagtatttgtttgctttaattggcgctagattgaagttaccaaattcagatgatgatgaaaccagttcacacttatttgaaaattgaaattggtgatacttatgttaacttttgattttttaaaaaaacaataaaaaataaaatttaaatgtagtatttgatggcgatgagcttactgacaataaagtcaattctcacttccttcagcatacccaatggtaatattaaacaaatggtaacattaacaattttagaaatggttagaaatatgtacagttctgtagcatgtgtgtgaagttgtacattagccttgcacacataggcactctcacatggacagcaaggaaaggcagaccattgaactaactctttagcctttaaaatggggcaagttactaacttttctgcaatttttatccccataagattctctcatcatagtggaaagaaactaatatttctcaggttcctatgacgtaccgcatttttcactaatttctttcatctctttaatcctcacaataagcctatgagatgagtgctattgtgttcattttagagatgaggaaagtaagtcttgaagaggttagagtacccaaaatcatatagccaagatttgaagccatgcttgaccagatctaaggtgtgttacattttgtaataatgatgattgtacttgaccccaagcctcctttttttagccccctataaccatgacttgataatagctaaaaaattgtattgagtagccttaagaggagctatttggtacatattcacatgtgggatgtgtgtgtgtgtgcacatgtgtgtgtatgtgcataaccctcaaactgatattaagataatgttactaaatcactacctaattggagatagaaaaactaaagttcacaaagagtgcctgcactttaatgtggaggtttgaccacatatgtatattctttctcatgattcatttgaaattatgtctgtatgataaactaataaagttaatccaaaaagacaaagagagcatgaatctttttgagatatcaacaggcttcagcaaataatagaacacatgaagtgatacaagattggcaagaaagaacagagacacttttgtgccctcaaagtagtgtagcagtagaacacttgagagatttcttcaggacttagaagaaccagatatcatagaagacagaagagacaaaaacagcagattggtttaaaattgtatatgaaatatatgaagtagctgaaccccctttttcaccctggaaagctaagtgacaagtctccaacccaggataaaagccataatttatctttggagaaagacttgggactctagacaaagcataggacaaaaatgggcattttattaaaacaggggattatgcctgccagatggtgagtctacagcccctttctctgccctgcttctagaatgtagcaaccaaacaagagatttttataaatatcaatccacctctgagaaggtatctccagttattgactctacagtggatcccaccgtttacaaatgctgtgtatatacatggtgcttttaactgtatttttagtaaaaaaatattttatgttttaaatatgattgaaaaccaaggatcaccagactttggaaaatgcctctcatagcaaggagagaagaaaatagagataatgtgagactcaaaagaaaacttaaagtataattaatttcctcagagagttaaagatgacataagaacaagaataggaagcactgaattagaagtggtcagaagacaaggaagagcacctggaaattaataatataataggtgacagattcaattaaagagctagaagataatacaaaagtgaaatcatttgctgttttcaattttatgtgtaaacattaagttgattaaaagatcagttgtctagtgctgtgaaaacttttaaaacagaaaaaggaggagtcaaaattgaatagggggagataaccaagatagatactgaatcaggatgtttacattttggcttaggagactcaattttcagcatagtggaataaggcactcccaaactctacacctccataaaagtaacaagaacattgacaaaaacttaaaaaaaacttcttcagaattctggaaattaaataaaggctcacaacagtctgaggagtgtttatttgagaaaaaaaacaagtgactctcaggaagaacagcaagacttgtggaattttaacttgccctaattccattctcctttcatcagtgctacagtaaccttgcacaccaacaatctttatttgtggcatctttgaaagccagcatggtagcagccactggagaggatagaacaggtttggagcaccttaaaaaccccatcccagagaattgctattatttgacctgtccaacagcatgctaaaaagctccattctcagggcttgtctttatttgacttagattcagaacttggcctgtgtgaacagcactatccacagagcatttgtcaaaaacagccagtggtaattgctcaccatcatggctgcccaaggctccattaccaggtagtgccaacaagaggctgaccaaaaaatacaaaaggaaaatctgggggaatgagatagctacagtgggttttataaagctcctacatacaccaggaatctagagggccacatagatatccagggctttgtaagagctgagaaaacctgaagatctcacttccagctgaccttgaggctgtgtgcaagaaggaagtgaagaatgaaacagagttatatggcttgatggagtattgaatgcatgccccaacatacacacacacaggctgaaagatttactgattcacagcatttaaggaaatctgtcatgtcattagtggaccacgaagtggcttcatgtataagggaccttcaataaaattaactgactgacttctcatcagaaaccacagaagccagaaggtaattgaataacatattcaaactgttgaaacaaaaagattgtcaatccagaattctatatccagcaatattatccttcaaaactgaaggagaaattaagacatttccagagaaaacaaaatataagagaaacacctgccatacagaaaatactacaaagaattcttcaggctgaaatgaaaggacactagagagtaactcaaatcagtatgaaaaagtaaagtgtgtagccaggtgtggtggctcacacctgtaatcccagcactttgggaggtcaagacaggtagatcacgaggtaaggagatcaagaccatcctggctaacatggtgagaccccatctctactaaaaatacaaaaaaaaattagccagacgtggtggcgggcgcctgtagtcccagctactcgggaggctgaggcaggagaatggcatgaacccaggaggcggaggttgcagtgagccgagattgcgccactgcactccagcctgggtgacagagcgagactctgtctcaaaaaattaaaaaaaaaatttttttttaaaaagtgtgttggtaaagataaatatgtaggtaaatgcaaaagacaatagaatgtattttcatttgtaagtcttttcctctcccatctgatttgaaagataactgcaaaaagcaagaattataaaactgtgtagatgggcttataatgtataaagatgtaatttgtatgacaatagtacaaggaaggggaagagaatagagctatattgatgcacattttttgcaaacaattgaaattaaggtggtatcaatctgaactagttttaagttaaaatgttaatggcaatcctcagggcagcctctaagaaaataactcaaaaatgcatagtggaagaaacaacaagagagttaaaattgtacactagaaaaatacctaacacaaagaatgcagtaatgacagaagatagtaatggcaaaacagaggaacaaaaaggaaatacacacagaaaacaaatagcaaaatggcaggcatatatcctactttatcaataattacattaaacgtgagttgattaatgctccaaccaaaaggcagagattgacagaataattttttttaaaaacaacatgatccaactatatatgctgtctacaggagacacactttgagtcagacacaaataggttgaaagtaaaaagatggaaaaatacatgtcatgcaaacagtaaagaaagctggaatggctatgctactatcagacagattagactgtaagacaaaaatcattactggaaacaaaaaaagagacattttataattataaaaggattgctccatcaggaagacataactataaatgtatgtgcacctaacacctatgccccaagatacatgaagcaaaaactaatagaattgaagggagaaatagaaattcaatgataatagctggaggcttcaataccccactttcaataatggataggacaactggacagaagttcagcaaagaaatagaagactcaaacaatactctatgccaactagacctcaaaggcatctatagaacactctaaacaacagcagatacatgttcttctcaagtataaattagactacaagttgagcctcaataaatttaaaagattgaaatcatacaaacttctccaatcacaatggaatgattttttttttttttttttttttttttttttttttttttttttttttttttttgctttttttgagacagagtctcactctgtcacccaggctggagtgcagtagcacgatcttggctcactgcaacctctgcctcccaggttcaagcaattcttgtgcctcagccacctgagtagctgggattacaggcatgcaccaccacacccaactaatttttgtatgtttagtagagacagggttttgccatgttggtcagggtggtcttgaactcctggcctcaagtgatctgctcacctcggcctcccaaagtgctggtattatagatgtgagccaacacgcccagccctgggatgaaatcgataatcagtaacaaaaggaaaatttggaaattctcagttctgtgcaaatttaaaaacacacacagacacacccctaaataagcaatagttcaaagaataaatcacaagagaaattagaaatgagtgaaaatgaaaacaaaaatacaacatatcaaagcttatgtggtgtagttaaagcagtagttatagggaaatatacagtttaaatgcttatgttaaaaaattattgcatgtatattatacctaaataaagctgatattaatgtagaaagaattggtggcccatatttttgactgtataaatttgcatactaccatatatttgtagttgataagttttctctgattgtggtataattcaggaagaattactaatactttctttttttttgagacggagtctagctttgttgccaggctggagtgcagtgacacaatctcagctcactgcaacctccacctcctgggttcaagcgattctcctgcctcagcctcccgagtagctgggattacaggcacgtgccaccacgcccagctaatttttgtatttttttttttttttttttttagtagagacagggtttcactatgttacccaggatggtctcaatctcctgacctcgtgatacgcccacctcagcctcccaaagtgctgggattacaggcgtgagccactgcgcccagccctaggaattattaacactttcaaaccacatgtaaagttcactgaaaaaaaaaaaaaaaccaacatggtttttaaattgtgttaataaatattaagcttgtagttaactatatgcatgctaaagtagttagagaaaagtgtactgatgtttgcaatttactttgaaatgtaataacaaccagaacaaaaaataagatgggttgatagataaatagatatgtgctaaaaaacaagtgtaataaaattattttggtctttttgtttccgttttttgagacagggccttggtctgtcacccaggctggagagctaatcatagctcattacaacctcaaattcctgggttcaagtaataaaatgttaatggcagaaccagttgatatgtttatgggtattcactataaaattctttcacttttgttttatgtttgaaaaggttcataataaaatgttgaggaaaaaaccgtaaactcaaaatgtcattctgaccctgaactatttactattccataatttactaagttaacatcctactgatcagaaaaaattaatattttctttaaggagccctagctcttttctaggcaatactttcttatactttgggaacttgatgtgttatattataggtaaacattttgaaaacaatcaccagagaggtgttatacaagagcataatgatattctatgaggaaataggatcttataacctcagggtcaaaattcctaagagactcttcccagagactacaattatattatttatatatcatattattatattgtatattattatttatattatattttttagggattcagatcagcttactttatgtcccctaatttctgtagaaaaacttgggaagtaggccacatgtagacaaattaataaattcatgcctgctcaaatacagttcatttttccatcctgccattttccagcactgtattacttctacagatcttgctcttctattatgagaaggcagtttagatgccgctaaactcattctctgctctgcccgcataatcctgcaaagctgctggtgttgaggcttcagtgttccatgcagagtgattttccaagtgatgaagcagattctaatcagtctaagatccaactacagactgggagttggacctctgccacctttccctccagctctcgcaacacaatggggaattcctgtgaggatcactgggtacacttcaagctcccctgatcctatggcctcattccagtcacagatcttcctgtctggagcatttccggcccttctgtcctttggcttggagagttcagctcaacctgggaagggacagaagactttggggttatcaaaagcctgttgaattatctgatgcaagactaactggtttgtttgcctccctggctctcttcctgagcttcaaagcagctgagaaaacaacttttttctaagtcttggacaaggaggaaaaccctggcatgaaggatttctgtcgcagacacttggcatagctagaggaaaggtttgtttaacttaccaatgggttttattagcctaggactccagttgaagtgagataatagggtccctgtagaaggacatttcagtcagtgggcttcctccctaatttctcgacaggacccttgcatgcagatgaaaagcatcagacacattcaacaaggaaatccccactgaatttatcaacgaccacgtaatcttgctgatcatgagggagactgagacaggattaaaaaactagcaggacaggaaattgtgtatggatgcaaagtcatattggggagctatctacttcaattgcttcttgctgaacttctctttgctgaacgtattacattgtctctgggccccacatcttatagcagatagcagggatagaaagaaagccagtcctaccacctgtccttacaggaagaaactcttctgcttatacttttcctctgccaggtcatttcactcttcctttcacctcccaaccaatgtgagatttggggttggggtgggaaggggaaggaaatagaagagaggaagaattcatgactggtgtacaggaagccttcctggcacaggaattagagaagagaaagtagaagaatcagtgccagcttaccctcagcctcatggccgcctattcatgtctgctttcctgggccacataggcaaaactcactttttcctaaggttggggctgtattgcaggaactcatgtaaactgccaggaccagaagtctataaaagcagcctccaggccgggcacagtggctcacacctataatcccagcactttgggaggctgaagcaggtggatcacctgaggtcaggagttcgagaccagcctggccaacatggtgaaatctggtctctactaaaaatacaaaaaattagctgggtgtggtggcaggtgcctgtaatcccagctactcgggaggctgaggcaggagaatcacctgaacctgtgaggcggaggttgcagtgagccaagatcacaccactgcactccaacctgagcaacaagagcaagactccatctcaaaaaaacaaacaaacaaaagcagcctccagggtagcctgtgcccaaggttcctgacatctctgtgctgcctgctccacactggccttcctagccacccatggagaaggactgggctgggttgcctcagatgagggccacacctatactttaaaaaggaggacccagacactatccctagaaggtgtcgccatcctggagaaggcctggggtgactatgcccagcactttctgttctgtggctccttttccactttctgagcctcttggaagtgggatcaggccaggaaaaacatgtgatgctatagcaagctgaaaccaaagacttgactttgggcctggccaagccaagaatcttggcagtgattgactgggaagcctgctgttttctatggcattttctgagtcccctaactctgggaagagggaaccagataagtcctaaaaatggatatgaatcagtagagcttctgtgggtcatcaatttgtgcatttattcactcattcattcttgtatttcataatgaagcttctcttacgtatatagcaccacactagaggtttgtgggaccagaaggagcagcaacaacaagaatgggtcaaatagattatgttaaattgaggtaacattaaccataaaacagtaaagaaaactaataattagagagtacagataaagtatgaagagattagagagagatgactttaggctggagaaatcggctgaagcttctggaagaggtgacatttgtatttagactttcagggatgaagggcagaatgaagactgccagtgtggaagcttgcgaacagctgaggcagcccgcacggataccctgtccagctcccttctttgtcttgaatcatgcaatatccatgcagggaaaaaaaaaaaaaaaaaaagcccttatttgctgttatgtatcctgcctcatttaatgtattatcccagaaaagtagattgagttgtatgtggcagattgggagctgccatcatggtggttaaaagtacagaccaggtagtacagaaccaggtagcctgggttggaacccagcttcagtacttataagctacctacctttgaggattattgtgaagattaacgtccattggttgttgttgttctcatcagcattattactgtaggaaccctggaagtctcccctacccacccaagtcctattgcactttctatcatgacagaccatttctcttttttgagagtcttatattacaatgcagacacacctgagagggctaatgcgtgaaggtttaccagccctcactttaggggtagagataattagctgacagcttatttactaagagcaaaatagaaacctggggagagggacataaaagaaggaggagagagtttacaaggagaagcccatgggccccaatggccaattttccttccacgctttatttagagtacataggcctctgtgtttctacttgtcattggagagaaacctccacacaccagcatagggatgaagtgaagaacagtgaggaagatgcctgcccatcattctaggagccctcagctgaaaagcaccgtattgggccctagagaagggaacagagtgagattacagaaaatgccccagatctgctgagtcccactgaaaattcagagcttgcctctaaaaaataaactgaggtagaaacaggtagcagtattttaataagtgcacatttacagagtgtaaattgaatctgcctggcccagagtgtggtactcaataaatgtttgttgatggatggattgaatgccctagagtgaggagcacgtagtggaatgtcacagtggaaaaagcccaaaggcttccctgtattgtctgtcttctgccaccagaatgtcagctctatgagatcaaggacctctctgtcttattccctgctctatcccctgcacctacaacagtgccaagcacaaagaaaagagcccagtaaatatttgtggattgaataagtgcatggatgggtgggtggatggcacaaataacgaaaattgcttccagatggtagtgggattggggatccagcatcgagtacatattggatataccttaaatgttcctccaaagaattgatggatagttggatcaattaatcaaaacagagtctcacgatgttgcccaggctggtctcaaactcctggcctccagcagtcctcctgcctcaacttcccaaagtgctgagattacaggcccgacacctccaaagaattttaaaatatgggtgaccactttccttgcaaggataggtaaagagaggagaaagtgtatttgttagagtgcagttaaagccaagctggtctgatatgaaggaaatattcaagaagaaacaatttggctatttgtgggagatgggattaactgcccacataccacatacctaccacaaggagccccaggctttctgagccacatatatctacactcattcttgctcagttacatatttctttgaaccctcagacttccaaagccaactttcacacattgcacacaggtttgagtgcgatcagaatttttcactagggccctgttgttttattaagtacctaggcctccctgcagggcaccatgtattgaagaagatagaatgatacttgaaaaccacctaagtcagacaatgattagaactccccagatttatgggatggatgaacatctgaaccagcacagcctaaattacctgctggggggttgtctgctttggaagaggatagtttatagtttgaatggcagaagggtcatggggcattaattcagatcaaaaaaagggaggaatctatatgtatccacaaagatacatggcaagcatcactttttttcctgaaatatattgggctagaaagctaatttacacttcccctcactagtatataatactatagaatcttcaggttagaaaactcaaaagcaatgtgcatcttcatatagtatatactactagcatataatattacagaatcttcaggttagaaaactcatagtgaaagcaatatacatcttaatatagtatatgctagtatataatattacagaatcttcaggttagaaaactcatagtgaaagcaatatgcatcttcacataatatgtactagtgtataatactagcatatgacagaatcttcaggttagaaaactcatagtaaaagcaatatgcatcttcacatagtatatactagtatataatattatagaatcttcaggttagaaaacccatagaaaagcaatatgaattttcactccagtcctcttaccatgatgtttgcattgaagtgtttgtggtcattgattgctttgggcctctaaccaccttcttgtttgtcattttttcttttggaatttgggccccagtccaaacacattgcatcaggcatggtttcctgggtgaggaggagagcaggactatcacctcccttgttccacatactatatctccattgatataacctgagaacttgctagatttttgaaaattacatctcacagctgactaatattgaactatagttaaccaacattccattttctgaatgctgaatctcattctggctgttccataatgaatcattggtgctctgttctcaaggacaaggcatttcatttagttcaataaaattgcatcccaaacaatgtgtaggatttgttccaacattctaaccaaattgagatttgttttgatatcatgtttatctgatctaatatatgacctctttctctaaattttttgtcttctgttaccttcccatcaattcagcatctcatcattgggtttagttacatgattcacaagtccaaatgtcacctcttcagtgagatctcatgatactctattcaaaattgatgcccccacctccaatccagtacacttcctgtattctttatctgctcttttcatccattgcacatatactcattgaacataacatattttatttattttgtacttcttatctttctttagaatgtaagctctattagaggagcagtttttgtcagttctgttccctgctagatttcatatttgttgtatgggtgtaattgaatacatcagcaatcttattcaagtcagtaagaccaagctagaattctgtacattctactagaggttgctgcccctcaccaggttactactgaccttttggtcactcacaagtccacttaatggtattagcacccagctcaacttatcttcactttatccagaaggctatcaagagagtttgtcacattttttgctgaaatcagatattttttattggtgctagccctctgatctatcactctggaagttcttttccaaagaaaggaaatggaattcatctgacataacttatcacttccttttttctgactgcacacagatcatccttttgatgactcattataaatcctgctccagaaggacagtgcattaatcagtgacctgtccgaactctttgatttccggcagagaggtccctccaggtgtgagatccttttggctggggttcagggcttgctcatagactggctattagaaggtggagttagcaccacagagttggaaggcttaggctcagatgccattcttgtgtctcattgaaatattacattctttttttctgggtctcagtttctgcagtgcataaaataaaaagggtaatatttttaaaaatatagcatgatactttatttattgctatttacacccttttggtttcatgtctagttgctacatacagacaacaaagatctgagatttttttatatgtttagtttatttttactgctatttgatctaaaggatttacgtttatcttatccatttccttttttaccactctttctggcacagctatagtttaggcccttatcatctcatcactgaattattggagttgcttcctaactggccccacatctcccatctcttgcttctccatcttagactcttcaatcaggctaattgcctagaacctggctactcaaaatgtagtctatgaaccacagcatcatcgtctcttgggagcctgttagaaatgcagactctctcaggctccactcaaaacctaaagaatcagaatatgtaggtcaacaggacccataggtgatgcaaacccacattaaaatcgagaaccactgttttttcttctaccatgccattccccttctaagggatatccttaaaattcacattgaaccgggccaggcgtggtggctcacacctgtaatcccagcactttgggaggccagggcaggcggatcacgaggtcaggagattgagaccatcctggctaacacagtaaaaccccgtctccactaaaaatataaaaaattagctgggtgtggtggtgggtgcctgtagtcccagctactcaggaggctgaggcaggagaatggtgtgaacccaggaggtggagcttgcagtgagccgagattgcgccactgcactccagcctgggtgacagagctagactctgtctcaaaaaaaaaaaaaataaataaataaataaataaataaataaataaataaataaattcacattgaaccatctccgaactgtctcaggcagaaagcaatctaccttaattttcaaatgagatatttttgacatgaaagtgtaaattcccacctatactttcttctcattggttctgagaatgatgaattagtgtatctaaataactttagaacatttgtaaaaattactgcaactcaactggagactttcttctggtaggagccaagtatattgttatttggtgagtgagggttaagggaaccatatgtgatgggttagttggaaatgttcctattatttattgtgaacttattttgtgtttgacacagtgacaggtattttgtatacttaatttaatcctcataataatgccacttaggaaggtgtttttatcaccattttacaggtggggaaactgagacttaacaagtttaggttgtccagagtcacagttttggttagaattcaggctgcactgtagcatcaaagatgtcaaaatacagtggttgagccaagtggctctgccctgagaggactggtgaccccgagtgggagacactgatgctctctgaagccacccagcttccctctctcatgctgccttgtcatccccagagtgttgtccacacccatttgcttggatctggttcctgccttgggaagagcgaaagagaaagtggagggcacgcagttttcttatgaaaacataatccagaatttctacctatcatttgtactcacattctgctagtcaaagcttggtcacatagccacacctacttgcaaaagaagcagagaaatgtggaaacttggggagttatttactaaagggaagaaggggaatggctgctagaggaaaattgtaggctctgccataggctcctagccaatcagtggaagagctagattccaagcctatgactaaaacctgtgatcttttcatcacattttcccaccacttctcatagttgacagcaaatatttgttgaattaagataggccaagatattatatataagccttttgatcatttgaaattgtttcttccttctctcttgcctccctgattacctacacggttcagtgttcaaactgtctttgtttctgataatgttttaatgtgtaaaacaggaaactgataattaatcttcttcagtagaaatactataataaaataatctactaattattagaggttctgtagaaccatatgagatgtgataatggcttaatgatactgatttttttaaatgatcaaataaccatctcctttaaaataagtgttgtcttaggaaaatgccattgctgaaaacattttttgatattttggctggtatatcagttaactcttgctgcacgcactaatgcttcatgactccactaccaaaatctcagaggcacacagtgatatttaacttgtgtatctgtgggtctctaggggtcaactctttagcctgagccttcctggccaactctgtttcaggtatctattgcccttcttctgagatagcagactagcatggacatatttttctctgacaatggcacaaacgttaagagaacaactagaaatacttgaggctttttgaggcctcggctgggaactggcacaacctatgtcatgccacctggcaagtcatatgcccaaacccacaatcaagggccatgggaaatgctctacaccttaagtaatagaaaatgtagtcacgtagtagagggtttggtgaaggaccagggccaacaaagaaaccttcaattgctttgcctttcgcaagttattttgaatatttgcagtgatagtaaatcttttaaaggtagctttgaatttttttagtaaaacagctaagtttataaataaaattagagaatcaagctaggtttatttttgggcagaaaggtagctatttaagcatgtgttataaaataatgagacttatttctagaagaattgattcaagaatatggcatttgatgacagaatagttggaataagcatacagccttttaaggtgaccactttgaaaggataacactcatttaaacattgggttataaaatggtttttttttttttaaataagccttgtgacttacagtcctatgttaccactttgtctcaaagtgggaaggggagtgaatagaggcccatccctgatcctttgactaaccctagaaaaatgtgctttatgtgcagattcttattgccaagtcccctctggctcccttcacctcatttgtctacaccatcaaggaggaaggcctggttcttcaaggtaagatccttggattaagccatttctttaagcttatgctcagtgctgcccattgctagtggtaattagtgctatggttctgatagaagctagctccagacagaatcaaaaaccaagatgcattggccagtgatatttaccctagtgagagcaagagagcggcagttgtggcaagaatttgacagagaagattgaggtagggccgaaggagacctacagaatttcctaacagaatgagacaatcaaaacatgaggatcaaaccaagaaagctcggaattgctaccaccccattcctctttgcagatcctatggcatgaagtgggcaatgattctgacaccagtgtggaggtgaggagccagtgctgccccagagccttcttgcttaacaagctaaagaaccatctgggttggcagcctctggggcacaatgtcatggctccatgagccctacttccctgactccttctggttatcttgtttccttttcctgtcctgtcctgacatggtcttcctgctggggaccagacctttaggacctgcaccttgtgacgtgagcccaggacttagaaggagctgagttcttgcttagggtatagcaccctgaggccacatcctggaactcactgatctacaatggtgattcattctcagatgctagatacgccagtggttaggaaaggcacccgattacaggtctttccagaaagcaattaacatgaaggggtaaattccagcactgttagaagagtcagcccacaatgtcagatgtacaaaactgctttgtggatgaggaaggatctgcacagaagtgctcaggatatacatctgtcctctgctgtggggcaggagaccccaaccacagagatgcttaggtgaatatctggcctgaccctagaggagcatattgtcactgctgtccatgggagaagtcctgccctgaaggatttataagttaaatatttttcccaggtttatgaaacagggcagtccctgtaatttccccatggagacacaatgcagtgcaaagacctagcagggaatatgcagggcaggctggagagttcatgcttctaactaaggaacaggctgcagccttccctttccttccccttctaaaatgtctgcttcttaatggactcacaaagcggcatgtttgtttggtgcagctgagctccacagcggggactctcaggtccacgaaatttggggtgagaactacgacctttggctcttagcctttgacttatgctatccaagttccttggtaaatatttttttttacaattgcaaatagtgttttctgacaaaggagcagagattttaacaccagattaagcaaagcaaacagcaggcctctttgttacatactctctacgggtgtataactaataagcaatcagaaagctggacttttatttacccagtacacagggtggcattcagctcttcatttttagaggccttcttaaaagattagaagtatagtaagtagcaaatttcgttgaagatttcaagaaattctatggaagattacaagacaatttcaggaggaaaaaagtttgttctgctcagatgacgtgtgtgaagaggcttgatgtgatacacgcaccctgatcactaggcattttgttaaatagcatttctaagcccggtcaaatctggataacttttgggataacatttgtgagaagaagagtcactgagttgcctctctgatgttcattgctaagatcatgattttaagagggaagagaaagttatttagagaaagtagagcctggaaatacaatgaattggtagagtttaaaaaactgcaaggaatgacttttcgaaaaagttggaaaacaggggagaaagtggatcactaaaggaggctgacctggagctgtgtccaggaaagagaaaaattcaggaaaatgtcttataattcaagaacaacaaccagtaaataaaatgcttggttaggagacctcagaacctcacctggttgctttctaagttgttttctctatcccactcccccaagctacacatccctctctgaggtttcccagaagcagtggaacacctctgcttttaccagcaatgcccttgaaaacaaacctcttggcacactctgccttcttgctgtgtgctcccaaagactttgggaaaacaaaaaatgcaggtccccagaaaatgcaggcccctcatttactagaaagaacctttggattttaccttcagctttggtatgatcttgagaaaatctctgggccttgcttttgtcagctggaaaatgaaaacattaaccttgattcaagactttgaaaactgtcgcaacccattggtgggtcatgaagtgaaattgatgaatcacaaccagcatttgaaaacagagagagagagaagacagaagaaagagtgaagaaaaaatatcagattatatcacacatattgtttcatttcataaaatatttcttgtgtgattgtgtgtttgtgaatgtccacatacattatgagtttgtgtgggggctgcagcataaaacgtttttcttacgtggattgttgtaaccatcctgcgggatctctaacagccttgtcacatcagctttgtccgatcctcctaggagaggatgtactcatcattcccttagctcagcccagttgtacccttgagatctccacatactgcaacatcaaagctaatttttcccccttcttaccacatgaccaaactaaaagacacctgcatgattccccaggtttaaagcaaagaaacccttggtccctgggtggaaaacttggaaaggtaccatcagtcaaggccaagtagcttttcttacatgaggagctgcactggcaggtgagccccgagttggtgtggaggttggcacctggagctctgggtgggatgtgcagcccatgtccagggacttagagacagacagggcagctcctgtgctgccaactagaagggaggccgccagccactgtggccgacattcggtcttcaatagagccacctggatggtggaaacaagccaaccacaccagctacccgtgggggtagggaatgatccctcagtgccttttatcccttggcaagccccaagatgcctactggcctgctagcccggagattttataatacctgaagaactcctgagtgctcaagcagagggagggaataaaaggtgagggcagaattcgatttaccagctccacaggccatttccctcaccggttctcaaggattaggatgctgagaacagtcagcaactgggggacttctacccttccctcccctttgttcactgggatgggaaggacaataaagcggcaggctggagagactgaggggctggttagagatttctcaggctgctttttgaaactcttgaaggagccggtccatgctattgttgtagtaaaatagaaagcggaactattctccttttgcaaaaaaaaaaaaaaggaagaaaaaaagtaaatgaaagaacccccctcctcccagcatcttcaggaggcctcaactcaggccattaacatggtaataccatcctgtttgcatctcctttgtctgtccagcgtttgtctgggatcctggcctctggatgctggaaatacttaggccccaaaggagagggagctcacagccaccagtttcctgagggtttggactctgagatcccaggcagagagagagttgagcctctctgtgcaatgaagtgggaaatgttggggtaggaggggatctcatgaatccatttttcctttggtccccagagttcaccatgcaagtctcagtgcccactaagtgaaaaagctcagcagtttggctagcctcttagagtgatgctcaagtgtgctggggcctagtggagaggtaagagcaggagttggttctgggaatcagctttaatggtgtgtgcccacagaagcatctggcagcagaaaggaaagggagtttacagtgagctccaggttgacccacctctcctctggtcatgtcctttgttcccttagcaagccccgaatgttgtgccacccagaacacagctgggactcaaggccaagaataaagattctgtcattgaaagcagctgggctgtgttgctggcgctgcaggaggcctagaggaaaacccaggtcccagctctccgggagccctcctagttttcaggggctcataggcacaaacacctgcggacttggtgaaacagaacctaaggaaggggaggtccaggggaatgaagggttgatctagcacagcctccccgttactcctttcctcagggatctggggaggatttgtaaaagaaaagccaggttgtttggaacaggacagaagatagtggcttagttcctcagtaagacagaagtgtgttttttatatcatttttgcaaaatcaaagtcaggtatgacaggtttaatttggatcctggggctgtcgtctattagtgtaggtttgaatgagcgggagctggggagaccagggcaccctgagacaggtccggagaaggtgctggagatgaaattagtttcccatatctccaaccacttggcatagggtggcagaagaaaacagaaaacaaagcaacagcgatcttttttagagctggaaagctatgtgcctcatctttcttgctttgcttttgcaatcaagaacagtttgatcaccttttgaaatgtatcaggacaggcattaatctcttctgtttgttcccttgtcacaaacttgcgttaagttttcccaccccatttttttagtcactgagccagctggatgatttattgacaaaaatgtccccccaaataccaccacttgagttcatcagatttcagtttgaatcagtaacctatcaaaatgttttatgctgctggactcaaagtgacccagaagattctcaatttatttccatccaggtacagaggtatctgcatggtaaataccacctccgcacctggcacagcctggcattcttgtaggagcctgggcaaagagccctggaactcaatggagcaaagagagtgaactcctctcccagaggtcatggagaagaaggcaaagcaggcctgtcacattgtccccagcctgccaggtgccactgcagcctcggaaagtttgtctaggccaaggcgctctcctttgctgcttctgcctgcctcttagtgtgggacctcccagggagatgagaaaggagaggaaggactcgtatctgttcagttctcttctcccctgtgcacattcactttacatcccctccctccatgacatcttctcacacaggctctctgctttgtttactttttttttctggcaatcagccttgaagagagattttacaatatttggaaatattttataatatatgaaaaaaaattttaaatacagaacagtacagaaaatcataaaagaaaacaggtgaatctaacaccccaaataaatactaaaattttgtcccatttgtttcagattttttttttatttacaggaatgaaacttgacaaactttaggactcctttgtacctattcctggtccattccctccttatcccacattcctccacaaaagtggaaactctccagagtttggtctacatctttcctctccattcttaaaaacttttctacatatatgtgaatccacacatagtataatgattgattttgagtgcattctgaaatttgcataaatgatttattgtacacgatttcacaacttgcttttgttgcttaacactgtttttgtaatatagccatgtgatacacaggtcacatgatacacaggccacgtgatacacaggtcacattctttcaccttagatatccacatccattcagtgtgtgaatgtaccacatgctacccactcccctacttatggaaattttgattatttgtaacaattttattacctgtgcttcttgatgtttaggtatgagagtttcactaggtatatataaaaaatggaatggctggtcagagtgtctacacgtttccatttactatatcttcccaaattgctctccaaagacttttaccaatttatactcgttctggagatagtagaccaatttctctgcagcctcgtataatcgttaagtttgttgtcatctttccataggcagtcttctcatgccttctttagggatgcactgcactctagcctgagtgacagagcaaaaccccatctctctctatcttaaaaaaattcttcatttccctaaagttaactatataatagttcccagaaagtgagcttttaatctcatccatcaccctgattctcacttgaggaaactgagttccagaaaggtaaagtaatgttcactgcctcaaaattgggtttgtagccatttctaagccctcagcctgggctcctaagattttagaaaatccgaagtgggtttgggccctctcatcttccatcagggaagcccctgtgacaacttacctctcaggcttcatgagcctctgttgagatacttcaggcctgtcctgaaatttgaatctggaaattctaagctaaaatggattggtcatactgatacaataatccttcaacgaagtccctgagtgcagttagattataagtttggccaggtgtaactataacctaaactaacagtggtatacatgatagagatgtactgcttcctcctgtagtgccgaggaggaatgcagtccagagctggtttggcagcttagctctacatgtctatcgaagagcccaggccattgactttttgctctgtcacacctaggatgttgccgttaccatggtccagaatggttcagcatcatgccctccatcccagtagcaggatgtgcatgagatagagaatggtggtgggagagaaagcatcccccatcccttaaggacattaaccagaagttatacacattatttctgtttatatgatgttggccagtctgtaaatatatgatcagaaaggctaaaaatatagtcattaatctgggtggccatatacccagctaaatttcgggatttctgttatcatgagaaaagaaaatgaatattcggtgacacagccctttctgaagagcccagttgcagagattaggtgcaatagtacagacgtaagggctgggcttgttgcataatagagttatactcttaaaatgcagcataaatattgtatgtattgaaaagtgccatcaggaccctctttggttccagactctaaagtagaagagaaagggtatcacttcaccaaggatcagcacccaaaaatcttgttctgcccacccaaaacagaatctccttcaggaaggaactttagtatgtgttttgcttttatgcagtatccaggaaagaaacttcaatgagagctactattgcttatagcacaaggcagggcatgaacttgggtccaaagtcatagaccaaacacttttttttttccaaaatgttttttcctacctccacttttaaaaaaaaaatgaaacaaaatatcagttgaaataacattattgagaaaaactttattccaaggcctggactatagttagactggatttacatttctcttttagaacctggaagccacttggctatctttgcagagttaacaatttgcatttgcaaaaatggccaggtaacagtaccaaaatatgttaaatcaattcaggttgttgattttctttgaaagtctcttccaaagaacttcatgttctttctggaatatgatttaagctgcatttcagtgagttcagttcagcaaatatttgttgagcatctattgttcacaaagcatggtgctcaggggtcaagagatataaggctgaaaaaaaaaaaaaaaaggtcccttccttttagtagcccagaatctagttaggagagatgtagttaaataagtttaatcaaaagccaactgtgatacctattaccaaggttcaaacagtggaatatagaaggataaagggaatagacttattccaagtaggatgactgaggtaggttcttgagagtacgtgggacttggactggatttcagcttgtgaatactgacaaaaaccgcattccattgtctcttgacagaagccaatttcttttgctatttgaggatagattcagggacactggggaatgctgattagttccatcactaatgctgattagtagtgaatgttgagtcatgctgactaatgtgttctaaatggattgactcaacaataaaggcaacgttgagagtcaagagttcagatcctgaatttcaccgatgaagtgtaaatcatttcgccacttagtgcttaatttttttgtcaattaaaatgtgctcgtgggtgagaatccagtaagtcatcttgacccatgagggctttacaaacttcaaggataacagacagcttaacagcaactaccaggacaggcttatgcaacctcaggttattcatagctcacacagagtcagaacacccatcacatgctgctcgccagccatgcgaaacttctgtttcctcacacatgccatgagaactgacaaacagtgcactgaactcacaaaacccgacaaatagaggagcttttgaaaaatcttcctatctacctactggggtgtctgtgtctttctacaacaaatgtcgccacagaactaagggcttgcattgcagacacagctctttctctcttttgacatctccccagctagactgcttgagaacctggccttccatgtccagatgtttactgaattctgaagccctcccagagagcccaggttcttttgttgctctccaaatcatttcccacagaggctgaccagtgtcctgaaggagcccttcaatagggaggataaatgaaggcagatgaagacatgaccccctgaggcttgcccacatccactggaacaaagggtgtgaggcacaaccttgtaaggagtgttttggtcagccgcgtccctatgcgaggccaagtctcccccacagggctgctttcaatggctaccatcatagtggaagtattgggcatttgttaaggactgtggtgtgctagatatagcacaaaacatctaaatcatggtcccctgcctttgtgagggcttcctggctacagatggcagctggctttctcaggggaaacttgggggtcatagagaaagctgaagaggggtgcttgcttctgtggatgacctcttcccacccagtgcagcgacactccccttttgtctatagctatccttagtcaagccagggctgcgggaccctaacccacacttccgctgtgtttctggatctctggtttgcaaggccagtggctctgtgggcaatacgtatgaaagaggactgctgttggaggaaagttccatttaggttgctggtgggaagttagtgcatttcataacaatttttttttttcaaactttctcttttttttttttttcctttaggccaagagaagccatagggatactgtgacctttgtctagagttgatgggggtgtgatttgtgaaataaaacaggaccgtactgcttggaagaaggaaacggaagctgacataatggggattaattagttgattgctgttgagatggtaacagatttgctcctaaaccattgagctagcgatttcagacctagcagggaaggtgaagatgaagaagcctttgttcaggtctctagatgtgtagggctgagggctttgccgccatgggatgtcaacagccataataataatttgcacttatatagcacctttcaaccaggcacctcaaagcggtttaaccacattaattaattaaagcccacaatcctcctggggagaggaggaggatgactaacaagatttgtaattacaggagggaacatttccgaataaagtattgtctaccagataaaaagagtaggtgtaaaggaattggggtctccaaatagtaaccgattcagaaatgaaatcatggaatgatgtgggaggctgggggcgggcatgggcaagggggtcgactctgtgtcagagggaggtcgatgggctcagaattcactgacaggttcagatccagccgagaagtggagcatgtatggtattagtggcatttgaaggtcattagtggcataactattgtagtgtaaattcaagttttattggtatattgtgtatagccctgcagaacaaagactgagactcatgcagtatttaataaaggatgaaatgatttctttagatttaaagcccaaagctgggccagtcaattagcaaataaatcaattggtgacccgtaggataatttagtcgtttccagtagaacacccagcctacacactcctactgccatgaggctctgattgaagcatcagactgggttcagggcaaggtctgggggctttagccccttcaaagccaggcattaaatctttccagcctttggccttgtgacctatcttacccaggttgttagtgacctcaagctgtcctctgtagaatcactttgtacctgctcctccatcagagatttttagtgcattgagggctagaatcaagtctcatcctatttcatgtctcctatgagtgcccaacagagtgctgtgcaccaagtaggtgcagattgatgaagattgatgaagaaagactgagtcctttaacgactcagtatttgttgagcgcataccaagtgctcaggtaaagcttgaaaacaaagctcagtgtgtgcctgccctccaaaaatgtactccaaggaatgggaaaagacttacaaactattaactataatataaagcagaatcacatccaagccccgggcagcaagggcaataggaagagcatcttattcagctggagtgaatcagggaaggtattggtgtgctgtgcatcggaaggcaagaaggatttgggtagacctggaagaggcagagcaggaagatgtcccaggctgtgaccatgtgtctccctctgagtgaggtacattttgagaacttgggatgttcaatagaatgttggtgaaaaccaaggtgagttttcgtatttaatcaggaaatatacatttcctgtggattcttatgacatgaattggttaatttcagacatcaagggactatttgagaagttggaggtagggttcaggatacagtactccaaaatccggcacgttggccttgaaaaaacagcagaggcaggaaggccgttgtcaccttcccctcacccctcctctcctgaagcaggttgtaaaatgttcattcctgaagtgttcactctctacccagaggaaaggaatgtccttatctctgaagacacagggacagagaagaatctgaacaaacaggccttgctaaatttcccccagtttattcccattagatcatactctttagtcctccaatcatacttctgcctgactgtctactcttcatcaaacttaagcataaaaatacacagatttccctggtttgggggtggtctttcttcttattcttctttttttttttttttttttttgccagagtctcactctgtctcccagtctggagtacagcagtgctatcacagctcactgcagcctcaacctcccaggctcaagcaatactccaacctcagcctccgaagtagctgggaccacagatgggcatcaccacacctggctaattttttattttttgtagagacagagtctctactgtgttgcccaggctggtcttgaactcctgggctcaagtgatcttccaggctcaagccaccttcccagctcagcctcctaaagttctgggattacaggcatgagccaccgcgcccagccaggtcttcatttctaaaggttctcatgtcacataaaacttacgttaaataaatttttatgcttttctcttgtaaatcttgttgttgttgctgttattgttgtttgagatggagtgttgctctgtcacccaggttggagtgcagtggcatgatcttggcccactgcaacccctgcctcccgggttcaagcaattctcctgcctcagcctcccatgtagccaggattacaggcatgtgccaccatgcccggttaacttttgtacttttttttagtagagatgaagtttcaccatgttggccaggctggtctcgaactcctgtcctcaggagatctgccctcgtcggcctcccaaagtgctgggattacaggtgtgagcccggccttctcttgtaaatctgtcttttgttatgggggccttggccatgaaccttgcaatgcgttcatgcaagatattactttttctcccctacagtttctggtgcccaatatggggtgactgagacaccccactcattctggatcttgcagatgagatcctggggcaactgacaaaaagctggaaaaattagaattcttatcaaagtcagctctcccagatctctgtctgtagtgcttggtcaagagagacgttagaaatttctccttgtcccttccttcccaaattcagattatcaggaaaaaaaaaaaaatgtctatattgtgactctctgactaaatctggctttaaggtactcgtttgttactgatcctttccctcgcagggactgctgtctctttccttgtttttctcaatttctgtcctgataacttggtttgattttctccctgttggggcatgcaagctgtcttgagttccccaaccaacttcaggggagggaactcaagaatacggctggacagaaatgtgggttgcaccctatttccagctatcctaccaagtattgccagctcttggggggtttatttgtatatttcttttgactctctttgggggtagttctggatttgggagggctgcactctcttttgagaaccccttcttagtccatggtgaagtcataaaaggctctttggttttggttgagtcacttagtaggtactttcagtttaaaacaagaaaaaggtaaatgtatatgtttttctcttgttaatctgtgttttcttgtagtgctctcagccacgaaccttgagataggtgaggaaaatatattatttttcctcccttacattgagcaagatgctgtctgttctctgcaactcctaattgttctctcttcacctccattgtctgccacgaaaaaaaaaatgctacattgttcacacattaaaatggatcactcaaaagtgtctgaaaaaagcaagaggaaaacatatcctaattccaaatgtcaaaaattaagtggctcctccttgagactacctttttgaccccaagaaacaataagagagtgccctatacccagtgtttgacaaaccaatacagtactctcctgcccaaggccctccaggccttcaccacaaaccatgctgcagggacaggacgtaagcactgcctctgatatggagcacttgctgcgtgtctgacacacactttacatacacaatcttctctaatgcttccagtaatcttacaggtagaattttgtattattccttctctacagatgaggaactgaagcaggagaggttcagtttgtcaccagaaaggatgaaatgtggatttgaactcaggcagttctactctcttttctctttcatcccttgccctgtaatatttctgttcacaactcttattcatcctaagttcactaaagtactcagcataatactacacacacaatagtaaagaactcagtgaatattttctaaataaaagaatcaccaggaacaatgctagtagtttgatcttctactctgagcagtgatgctcagaatatagtagaggttccatcactgccttatcatgtcaccatttttaaggagcagaagacatgcacaggaaagttgccccaggaaatgttcacaagaaagaaggacacaggtagcattcttccccgtgagctgataatctgccaagctggtaccacccatgagattctagtgtggcattttgtatcattaattacttttactgaaagtaattacttttactgaaagtaattaatgatgcaattcagagatattttaggggtgtgtgtgtgtgtgtgtgtgtatgtgtgtgtgtatcaaagttcaactttgtctccctaatcctgctagccttctggccattctattaaggtattgcagtcctggtgaagattcagaaatgtgtggtccccgtcagcctacagggtgaacattttggattaacccagagagccttgaactctgtgcataatgtcttttaggttgtgtgttgtgaacaaagcaaaatgactgctcagagacagggttgtaaaagtttgtccagcaaaaccaggattgccaaatgagaattctggaaagggaggataaggattaggtaatgggagaaaagtgagtgaaggcaaggagaagtgcaaaatatctgattctagcctaaaaactggtcttggaaccatttggaagggtcattttttccatgttttattttcaatatcatcaccatcacttttatcctgtggctgtgaaaggactttcttcattccactccagaattcaaagaggcttcttttgcacaaatggagggaaggcactcatcacacttctcagccaaacatcctaagtgtgagagaaaacacactgcctacttctgaatttcggtgagggcagggttcagatggaacacatattttccaaaactccaaatagatctgggaggagaggaaaccattaaatcactagacataagtcaggacacatttggttttgttccctatcaaacagtccccccaaatctcagtgacttgcaaaatccatgcatgtctgagactctccagacaagctctccatgtgtgactcaatattgcacttcagtattaacatgcactgccacagttgccacagtaggggaagggaaaggtggatgggggagagagagaagaaagtaagaaagagagagagattgagcactgataattaagtccttccctcaaaaaatgatatacattccttctactctcctggccatgcagccactcctaacttccaggaggcaggaaggtaccacttcctccatgttctgaaggaaaggggaactggatattggtgaacacctgtaatgtttggcatgcacagctatacccagtgggcttgcaaatgtttccttcttccatattcacgcttgtatatacctttccctcagattacctggcatacatcaaagatttatggggtagtgttcaggaagaccaaacagttttgcagcctattttagtccacaggtgaccttttgaaatagaggggtagccaagaaagaccagttaactctgggtacttttcccctagagctttcagacacaagtaactctgggaagggatagtgggttcaagggagccatggcctgatttcaatgacacattcaagatagaacaactagtttgagtgaccccagaccatcatgccttgtgtgaaaagacttttggaaatgtgcccttccatttccattctgccgcttgttaccagacatgatgcacgttccttcaaagccctgtgacttttccagaaagcagctctccctgcaagagagagaaactttcccttattattctttcagtaatgaattcctgctctgaatgggctgcctccatgtgttttcagtcaagtgctgatggcagccttgcctgggggcatttccaaagctgaggacataagagatgaaggaggtctcatattgacaagagctgcttttggttttccttccagtttagccctcctgagccttgaaatgggagataacaaatgattcatcagttcttgttggtgaaccaacatgaccaccacacctctttgctcctttcaaccaatgaaaaaatcatgttttaaagctttcctcagagaggtttgtggacctggattttggtgacttaacagggatttaactttctcagaccaaaccagtattttgtagatgccaagacttcctttcttcaggtctcaaacatagacttcgcgtaccctgaggtgataagaacaaaggagaaattaggtcaccctgtttcctgcctaaaacctaatctcaagtacacaagctgcttccaagtaagctgtggtggtaggccatgtttgctgagagccagcccactcactctccctaaagcaaatgtcttcagacaataattcagctttcaacctacctgcatgaaacttgtacaaacttttagttacagttgggctattttctttctttttcttttttttttttttttgagacagagttttgctctgtcgcccaggctggagtacagtggcgcgatctcagctcactgcaacctccgccttccgggttcacgctattctcctgcctcagcctcccgagtagctgggactacaggcgcccaccaccacgcccggctaattttttgtatttttagtagagacggagtttcaccgtgttagccaggacggtcttgatctcctgacctcgtgatccacccgcctcggcctcccaaagtgctgggattacaggcgtgagccaccgtgcctggcccagttgggctattttcattgggaagaggagtctcaattatctccggtaaaaggggacacatactgttaaggatataggtggtgcagaattggaaagccttctggaggggaggcagccctgggaattcattatcctggggtctctgcttttctttacatgtctgcccagggctactctcactctcccagcagattttgtcctgcatactatagtttatttactcaaaacttcagtttgcacatggctcaccctgtgtttctctcttagcctttcaacttcagttcccattggcttttttccttggttaaaattctgaagagagaatctgattagctcggacttatcttagtgttttgtctcagacaacatcattggtcactggctaaccaaacctttgttggataaggaagtcgctgaaaacatagctgcccaagcagcaggaggtgtgggaaggccagcttttcctagaggggctgtgagagggcaagacagtgatgaactccagggcatgctttacaccctctaactggactactgcaagcatactcattccctcttgcttcttgctcataactgtagacctggtccccttacaccctcacagcctaggcatctcttttcactgctcacctccagcccctgactccaggatcttacttctcaccctgttaaagtgcccagtcacagaggtataggactagtgagtgggaaggaagagctgttgagatttatttaagaatatacagaagattagggaaggtgtgtaatgaaaagaggaatgaaaataaaatccctctctcagctaaagaaaattgtgttcccaccatgggacccagctacctttcctccttccaccagtctttggagttacttccttttcaaaaaaaaacagacatcagcagaagcaagaggagcttccattgaggaaccctgaccaagcaagtgggaagatattctctcttcattaacccccaaggtcttctctgtcccctgcaaggatcccttgtccctatccctgatccttgcatttctccagcccccaccctcaggtcttgtaaagtccagattcttgactaagaagtcccaaataactttcaaactaagattttaaaacacaagtgaaggactcggtttggatcaagtttttgccaattgtgttcttagtgcccaaagctctttattggaagttattcacaaatcttcatgatggtttttggacgactagtcacgtgtggtgttgccctatttcaaatgagtcagagaaattgtgctttatatgaattcatgcatcaaccagaggattagggggaaaactgaattgtggtagtatgctttaccatttattcattagatactattacttttgtacctcatcagatggctaaaagccaaacccaaaccaaatgtattcaaatttcagtctgcccatattatttttagtggacgtgagtctaggagtgaaggagaggctagtctaaatgtctgtgtttccttgccctttcttgaactccgggtatgtcaaaggtgattaaatcattggtcaaactttgtcctgtgactgacacttttatctagtgactagaattgcaacatttccctaggagcctatgatagtttttccaaacctgctactgtggggttctagtcagttcctccagagcacctccagatccctgcccattctatttagaatcggaggtttaagtctattgccactggctgtcctctggggcccagaaacctatatggggtttgtccagcctctcatcccagcaccatcgtccaaaccccacagtcattaccaatctaacagcttgaaagttgatacaaagatgaggcagaagccagtttggctttctcccagttctctgtgcccctccggagttaatcaacaacgacctatctttgtgtcaataacataagcctctctaactagaacacctggtgaaaagccggaggaaagcttaaaatgaagcaaattttgcagtgattattctgaccctcactgtttaagctggactcaggatctccagacaaaaactgcttgttaaacccaaccaactagttggatgaaccttaagccaccttgggttttgctaatatttttcatgcccacacctcaactccaaagtctgtaaactttaagcatcaactccccatttcaagcacacagggtttagtgagatggcctgagttcatctcgctggtagaattctttagtggcatctcctcatccctttcccaccctcaaagcccatcctgatggtgcggtcacaccactggagaaaccatagaccttcttaactgggattaccaacaccttctcttagtacgtattcacatggccttggatgttaggtgactgcctgttcagagaaagtggggagggtgaaagggagtgaaaaggcagagggcacatggacaacagttccttgctgtattcgtctgctcaggctgcataaaagaataccacaaactgcatggcttaaagatcagaaatgtattttcacacggctctggagactggaaatccgcaatccaggctccagcaggtttggtttctccggaggcctctccccttgtcttgcaggtggacgtcatctctctgtgtcctcacatggcttgttctgtgtgtgtgagctcttagtgtctcattcacttcttataaagacactagttctattggattagaactagtatcttcttgctttttattttctgtgtatccattgtatgttttttggtttgaggtcaccatgaggctaggacctcatatttatgaccttgtttaaccttaattacatccttttgttttatttttggttgttgatcatgatgtacaattcattacttttttttctttttttttttgagttaagtctcactctgttgcccaggctggggtgcagtggcacaatcttgactcactgcagtctccacctcccaggttcaagcaattctcctgcctcagcctcccgagtagctgggactacaagcatgtgccaccacacctggttaatttttgtatttttagtaaagatggggttttgcaatgttagccaggctggtcttgaactcctgaccagaggtaatctgcctgactgggcctctcaaagtgttggattacaggtgtgagccaccatgcctgctcattaattaccttcttttaaaggccttatctccaaatacaatctcactggaggttagcacttcacatatgaattttgaggggacacagctcagttcataacacctaccataactgttttcctcacagaacatcccttatcctctgatcttgcccttcttatctgattgggaaaaaagtagatgctggccaagaaatgcaagtatgactatgcagtttgagaattgctaagctaggtggggagggtgcatgagacaggaagaatgaaaacgtgggtggatggatacatgaatggatggttattacatggaaagacaaatgaatgaataaatggctttggcagtgtgttgatggcaccaggacagaaattacgttctgtttctttagggtttgtcttttttttttttttttttttttcaataatacagggcttacaaactcaaatgtgcatgccagacaggtaaaaagagttgcaaaaagaggccaggtgcaataataggcagttgtagggactgacagattagagagagcctaccgtatataaaggggcaccagttactgacaaagactctcattctgaccaaacttgagtcaggctcctctgagtcctctttctgactaggccccaaccttgggctctgtccttggcttgcttagtccagttttagcaagaatcctgctaagtcaattgagtgaaaattccccaccctttgtatttgatcaccctcagtacctaatcaaattcctcagcccccacccttaataccctatcacccttgcctgccttcagtaagaatcctgccatgtcagtttagcgggaatccccctagccttggtgtttcttcttagtaatttttcatccactgacatccaccctgctctttggctacacattatcacttttccttgttgtattcggagttgagcccatctctctccaaggctgcaaaaccccattgcagtgttccttcttgaataatgtcttacttaaagtctttaacaactgtcatgaaaaatttctctttcacagtctcagctctagacaattgttatcttgtgggatgctgacctcatgttgccagaatgtcggattttacaagggaagccagaaatctgggttttcagataaattttttcactatttttattttatttatttattttttgagatggagtttcactcttgttgcccaaggcggagtgcaatggcgcaatctcagctcaccacaacctccacctcccaggttcaagcaattctcctgcctcagcctcccaagtagctgggattacaggcgcacgccaccacgcctggctaactttttttttttttattaaatttttctttaaatcttgaaattcaaaaattataaaatattgtataagccaaatgaatgctcttgtagtccgaatgcaccctggaggctgccagatttcaactcttgggatgctagaaaggcatctgtaatgttatcacatgaagatatagatgcttgtgagtttaggctcatgagtagactgcctgggttcatactgcaatccaccacttactagctttgtgatctcaggcaattatgcatataattcttagagttattataaggttaaaattatttaatgcatgtaagtacctagaacaatgcctgctgcctagtaagaaagcagtaactgtgagctggtattattagctagtatcatgaaatctcttggtttccaataataccatttctgtaaaatgggggaaacccacttgccttttttaccccctaaaggcttgttgtgcaagtaaaagaacaactgtgaaagagcttgaaaaagtagacacattgctaagaaatacaccaggcatttctatgttcctattcccacagatgaggcacagcctttcccagtgcagggctgggactctgtaggaagaggaaaatagcagtaactagaaccagtcctttattcttctcagggtcatttgctgttttgttgttcttagaatttggtgagtttttctttttctttcttttttcaattatgataaatttcaacattcagaaaagtaaagaaaataatataatgaacacccaaatgcccttatctagatttcctaattattacatttggcagatgtgcttcacttggtgagttttcctggcagatatatgtgaatggaacatgcagagatgtggtagagaagtggggagaattgcagaataaagacagactgggaagctgagagccgtaactaccgcagcctctacttattttttaaacttgtaagatccaatcaagtgtggatggttgccttttggataggaccctggagaagggacttctgtgcagaatggtttgttatggagaatacattgttagcaccttaaagaaagtaatataaatgggataacagaaatgattttattatttatgtgattttaatttatttttaaagtatcaattcttttgcaaagagaatatattcatgtattgcttatgtcattgaaaattaaaaatttctagagagactttcaatgtggaaatgtctctgccatgaagaactcaggggttgaaacttgtggatctgagagaagtctgataaaatcagtgatttaaaaaatgttggtcactaaaattgaaaggttttaaaggcagaaacactccgattcaaagaaagtatatgctaattataagtgattcgtttctggtagattatttgaaaagattctctaagacatattgccccatttctcaacatcaactattactgcatttaaatgctaactcttctctctggaaaggatgtcttaacaacatgaaagcaactaaactttgctttaaaattctattattcagactccacattaatttaagctgacactccttctcaattggggcaaatcatcaaagctttattgtattgagaaccttgaattcagcaacaaagagcgtggggtatggagggaaaacgttgagaggggaagggtggagagctcccaaggccaaaagaagggaggggcagggaggaacactgcaggaaggacagcagagagaaagatggaccttggagaggccaaggggagagcggggagttagaaaaaggctgagataagcaatgggaggcctcctcagaggggccttacactgtcaaactgcccctggagcctctgctcattaacatggtagaagcaaaactagcctacaactttgtagtcacaaatttttctccagagttatggataaaaagggagctaggagatagagaaagggaaaacattccctttcttcctacatttggatgcctctccaatgtccttcctaaggcaccctgcccagtggccagtgcctgccagtaagcccactccacagaccctgaggcctggagccccagccctggtcatggattagtgcctggccaagttgcactccaaccccaggcccgcagccgcccttcctcctcctttctgttgtgattgactctgagatatatgatgtgggatatactaggtgcaacgcatcatgttcgttattgaggcataaggtaaggaaggatcttttgaaatgtgaggacatcatccacaaactgtcactgaccatttacgatttataactagaatgtaataagatttataagatgcactttaaagcctaaaagaaaactgagttttttcaacatgtaacaacatgtaataaatattaatttcaaaaaccaaagtagccccagttggtcttttctctacaccaaaacaatcctcaaggatgcatgaaagcccatggacactgtggagcagacagctcctagtgtccagaaacccgtcttagtccaagtgggggggcactgcaagaattcagtccccagcctaccaccttccagctctgggccctcagagaatgcccatagccttcccgagtcccaattccccagtttgtaaaatgggaatagaaataatctgcctaatcttcatgccagggggcctgtgaagatgacagggtagataaatgattggttttccaaccttcatggaaggcctaagcctgagtctatgacctcctctccagttttaagacataaatcagatcatgccattcgtctgctcaaaactctcaagtaacgctttttcactcagagtgaaagtggagtccttccacaggcctagaaagccccaccgattccagcggcacctgcttcttcgcctctcacagctcctcgcttgctcacctgttgcagccacactgcctcctagctgaaccctctcacaggcaggctttcaccttagagcctttgcacttctgaacccttgctggaacccttttctccagagtaccatagctgactccctcacctcctttcctcacataatggatgactccctcacctttaagtttttgctaaaatatcaccttctctatgagactgacccacttaaaattgcaacccgctctgcttacccccatcctgctctacttatattttcccaaagtacttatcgctatacaaggtaataaataatcaatagctcacaatgtttacccttcattctgtgtcttctctgctaccatataagccctggagggcagccgtctttgatttattcatttttttcttaagcacctagagcagtgtcaggtatattaatgacctgcaataaataggttggatctttcttagaagtccaggatataacatcaataaaagaagggctgctacaactgaagggatttgtgagctcaaaatccctcctgctatctctctacgagcaagtgcaaaaactgctgacatttgttcttgtgtgtgaaaccagttttgaagttacaaattgctacttgatgtcaggtccaagggcctacacaatagcttgcacatagcaggtgcctagtggtacagattataaggggaagggaagtaacatttgttgagcagctaccaaatgataggcagtgtctgtgcctagtgaactatagaagtgatttcatgaaactgtcaacccttctaccattgtctctccaggacctcataccaagcctggcatgtattaagtactcagtaaatgcctgcttatttccctaacaaccctctgaggcaagtaccattatccccatcttggaagggcccaagattcagatttagatagcttgcttaatgtcatacagctcgtgatcagagccaggatttaaattcttctcagacaagctgcagcctctctgatcctttgagagaatgtacattagcatccctccgagcttccctgaagcagagctgtctcccagcgacaccggagatgaggggaggggtctctttctccacctggactcacttcctccctttgtgcatttggctcacctggaggggtcccctgctaccttttgattaatgggtctgcccttcccatccccccggccgaatgaccccagagttagctgcagttcatcttgaatcataaatcaagttctcaaagacattgcagctttgtgctcaaaatctcactagaattcacattctttgtgaaaggcatttgcttatgagtagaatgatggattcatcaagtctctccttttaagaaaaatctggatggtatctgctggtttctccctgctccctccaagaaaaaaacagccctagttactcaatttcatgtagttagaattcccccaaggacctcatactcagcttccaccctggccatactaaagaagagccccaatcatgttgccattttacatagatagaaatcatttgcaacttgcacatttgttgtgctttccatatacccacgattagctcggattttattttttagccattgctgaagtgtcacgcgtcagctatttacactgtatggggacaaaacaacctaatgtatgtcccagacctattttatagaagccgagaggcagcctctgagtctccggttcccagaactctagccctgggagaaagcatatccataaatctcccaatgctttatgccaggttagaatttctcttgggaattttggagtttgtataagagttgcctctaaaggcaattgatgaactatagatgtcaggcgggttttcattttctgtgtgctttttatttcatctagaaccaacagtggcctttagaattggattcttttcagagactctctctataggtttcatgttcaaaggctccaggttggaggagctcgaggttcagctgagtgtcagaaatgaccaattctggctggacgcagtggctcatgcctgtaatcccagcactatgggaggccgagggaggcggatcagttgaggtcaggagtttgagaccagcctggccaacatggtgaaaccctgtctctactaaaaatacaaaaaaaaattatctgggcatggtggcacatgcctgtaatcccagctactcaggagactgaggcaggagaatcccttgaacctgggaggcagaggttgtagtgagctgaggtcacgccattgcactccagcctgggcgacagagtgagattccgtctcaaaaaaaaaaaaaaaaaaatgaccaatttcaccagtactgctctattagaaaaagggtgggggtagttcttcggttttgtgactatcctgtgtactggaggacatttgtacttgcagcctcatccagaaaatgccaggagcattccccgaggcactctaacagtcagaggtgtctgtgggcaatactccaagcacccccggttgaaaacaccaacaaggctatctctgaaagacggtgaactggggcagcaccactaagtttcaccatcagtgaggcgtcagtctagatgggcactttctttccactgtaagctgcttcctattcttgttgcctttgatgatctttgtttgccttcaagtcgggtttgttacatttgttttcatctccaattcctgccatataaaaatgagggcagtgagaaagagaaaggaaatactgaaattttccctcggactatagcctcccaagaagggtcgtgttctctggaatgacttttaactctttatccagttaatgatcgggaaagtttactagatgtaggttcccaagcccagcaagcagagtatgtgataagagatagaaacagggacagaaaaaaatggatccatcaggacccagacattggggtgcaaccagtgggtcttctccagctccacagcgcatcagttctgactcgcttgtagattcctgagtactgctcatctgccctacaaggcatagtgggttttctctgatttctagaaatgtcagcattctctgcaaggtgaacggccagagtcgggatcttctattcaggcagagattatataactccctgggccctggaagagcatgactgtctaccaggaaccatccagagaggctgtcagatgaatcagcatctgttcatgccctgccttgcttctcctgggcatgactgcctcacatgccaacacccaggcttacaggtcaactattccaaccctgcatcctgcccaccccacttgctggggagtgctctctacagctctcagtgcatcctgtttgttcagacccctttgtcttccactggcgcaaccgagagaggattcctccgagcccctttgcttttggctttgaaatcagatcctggcacacctgattatactcaatagctggaaatggtaaggatgtccgatggcagagagctcttgttttaagttctgcatgccaggaaggcagggggctgggtctccttctcagggctaggctggaggggcaggatgctctagcggaggaagcagtgttaacttgaagggaaacgcagttgaaaaggaactcgaagcacgggctgccaagcgcgtagaagtggtaactgacgacacactgtggggctcagaccccttcctctctgctcatatgcccctagatgggaaacattcagttcctgctcaagggaaccaggagaatcaaacctgtctgtcctgctttttctgtagaagtgtcagctctgaggccttgactaggtggaataaatagtgacttacctcttaaccacagtgaaaaacccatcaagcatttggatattaagggctgcccctgtgttctcaagggaccctcagcctcagacactgcctcctttcaagcaaagatgctgccctaacacgcaagtccagtggctttaagagtcattatgaaaatttcacacaaaaaggcacaaagagcatccatgtaccgaaacccagcttaagaaatgaaatgttactgatgcaattaaagccgcctttgtccttttggtcccatccttccatcctgccttcccccagcagtaaccactcagtcattgacaaacagtgtgtcaaacatgcacaaacggtgatgtgtccatccctctttggaattacttaacctttttgaacctcagtgtattcatcggtaaaagggggctactgacaggatgaaggaaaatgatttatgacaaatatttggctgttgttcctataaaaaggaaaaagtcaccggaaaaaatgggtcaaatgtaagaccctttccagcctggccccaacttgccccggcagcctcctctcctcttgtagccatattccctcctctcctctctgcagcagtgttccccagatatgccacctgtgtccatgcctctgggccaatgtggatgctgtgcttacttgcctgtaatgctggtctcctgtcaccatcttcctttaacactggggtccactgtccccacctctgacagggcccagatgcagtgactccttggtgctcccatggcctgatacctctgtctgagcacttgccgtatggctgtgatgttcctggtatgtctgcctggctttttcactgagctgcttatgcagcaaggcagggatggggtcttctccatccagtggcctggcctattgccttctggcgcatggcaggaccatatgcagtgaatgaatgaattccattaagaacattcgtgattcataggaggaggtcaaaatatcaacattaacaggagcttggaagaagctgatttccaccctcatgaatgacttcaagggttcaggtgcatgagtaaatgacagttccatcaacagactacaactttctgccctagttaacacagggcatctccatgtccccagttctccctatgggcatttttctctttgaaattccaaatcttttctgttctagaagcacgaaactacaagttctctctcaactcttcaaatgaggttggaacaaacagaatgggggcatgaacttttttccccataacttcaataaacaacagttttagcctcagtaggctttatgcaagccttcaacatctttttctaggtatcttgacactcatgttctttttcttcttgcagcctatggaaattcctagagacagataaatgtgcaaacctgttcatcttgccaagaaaaatccgcttttctgccacagaaacaaaatattgggaaagagtcttgtggtgaaacacccatcgttctctgctaaaacatttggttgctactgtgtagactcagcttaagtcatggaattctagaggatgtatctcacaagtaggatcaagaacaagcccaacagtaatctgcatcataagctgatttgataccatggcactgacaatgggcactgatttgataccatggcactgacaatgggcacacagggaacaggaaatgggaatgagagcaagggttgggttgtgttcgtggaacacataggttttttttttttaactttctctttctaaaatatttcattttgatggaggtgaaatttatataagatgaaattaaccattttaaagtaaacaattccgtggcaactagatatcatgatgtgcaaccagcatctctgtctagttccaaatattttcatcaccccaaaagcaagacccataaccattatgcaagtgttcctatttccccctcctcccagctcctggaaacccaccaatctactttgttgctatggctttacctattctggatatttcatataaatggaatcatatagtgtctgtcttctttcactagtatgttttcaagtctcctccatggtgtagcgtgcatcagtacttcattctttttatggctgaataatattgcattgtcaggatatactgcattttgttcattcattcatccgtcagtggtcatttgggctggttccacccttcaactattgtgaatattgtactgctatgaacttgcatacacatgtatttatttgaaacctattttcaattttttaaggtatgtacctaggagtggatttacttgacatatggtgattctatgtttaactttttgaagaactgcaatactattctccacatggctgaatcattttgtatttccatcagcaatgtatgagcacaggtcagattttttgggagtcacattttaaagtggcacaagacccttctagagggctctgttccatgcacacaaaactcatagtctccacgtgaagacacaaatttttcacaaacatgcaggcagagaaaggagagaaagtggaccctcagcagacaagttgaaagatggttcagagaagcagtggacttcacccatcatcttgctgtgctctccatagctaagcaaggggcagactggagattccactggctactttgtcttattttcacttctttccagttagtccccactactctaccctttccacaggactgtagggttacggtgactttcctacccctagccaggttccagtggtgggggactctgtgaatataggatctagtgttcagagctcccagatttgtgcagactgaactctacacatgctacttgtcaacatctgtgagccagaaataggaggaacacctttaaaaagaaacctacaaacacaaagttattcatagatgctcttgaagggcaaagcagggccaccaccagagccccatgcaattagactcatcagagggaaagggcataacactggcttttttcttaaaaccacctggaaggagctgagacgtatactaaatgtatatagaagtattatttgattggaagaaacaaaaaatgcattgtattataatctgtcttcccttgccgtctggtagcttaactgtcagcaattttggaggaaagcccttcccagcaggggactgggaacccctgggcaatgtctttcctatgacacatggatctctatggttgaataaggggctgaaggaggaaatagacaacaggggtcagagagcaaggctagaggaggcctttgagaaaagagagttgtgcccccttttcagtgagtgtggggcctctggaggttggcaagaagaggagaaggtgaagggtttcagcactgagagaatgatgtttctggtggggctttgccagaagggggctcatcacatgtgagtttttgcactcgtaagcctaaggggcacaatgggttttgaaatcccaacatatccaactaagaacaggaagccctgggactcagcacagacttgagtcccccattggatgcaatgtttcttactaagcggaaagaacttgttttcactccctgccaatgagtaaagaatgaagagctagatttttctttgaaggtggtggatcatgacccctccttgagactaagcaaagaagcactgatgttaccatggagaggagtgagcccctcacccaccccaggtgagaggtcttatcctgactttttagtcataatccaatgtgatattttgcagggttagtggatgcagtaggttaaatggtggctcccaaaaagatacgtccatgtccttacccccagaacgtgtaaatatggcctgatttgtataaacggtctttgcagaggtaattaaggatgttgagatgagatcatcctgaactacccaggtgggccctaaatctaatgacaagcatcctgataagagacacagaggaggacagtcacaaagaggaggaggcagtgtgactacggaggcagagactggagttaagcagccccaagccaaggaacacctggagccaccggaatctggaagaggcgaggaagaggtctccccaagagccttcagagggagcctggccctgcagacaccttgatgtggggcttctggctgccaggactatagagaatacatttctgtggttttaggccactctgtttgtgacactttgttgctgcagccctagaaaactaatgcagtcaggttgcccagagagatgaaatgactggagagagagagaatctggtcgtctagaaaactgagttcagcccctggacttgctgctggggtctgaggtgaactttcctaaacgttgtgctgtggagtctcttccctcttgcgttcctcatacattaacttctcatggcagagatcggagctcatggttcacctgaggacactactaaggaccaaggaagttcaatcagatcctcacatctatttgaaatagtggtagtaataatgaccacactctatagaatgtttaacatgtgctaagtatgtcacatacattatcccatttaatcctcgaaacaatcctacatggttgctattctcatccccatcttacagatgaggaaactgaggctctgggaggtaatggaatctgctcaaggtcatttggcaaatgctggtggagccagaccttggccccaggtttgcctgtgcttaagccacagtattacagaaggctcaagacccacagagatggtcgggccagcagcccgtagcacccagctgtcagatgagaaaggatttatttattgatgtatgtattttactagcagcactggcattagagtttctttgtcagtgagggttggagtgatgggttgattgaaatgaaggttgctgagatgacctggtgggtcctgctaacagcagatggatgtcaaaacatttgcattcagggggagataaagtcaaaactgggacaaatcaactttctctcagctccagggctctaaggtcctttcttcgctctcagccttgttgggaaaagagaagaaccccctgccacatggtctctctggtgtgagaagctgacagtccactgctgagctttccctgctttgccacaaatagaggcacctccccacacaactccctctcctgctggaatgggaagagaggacactggctgttaagaagagctctggggatctcctgtcctggggcaaactcagtttctggagtcccctcttatagggctaaacccaggtgggctctgactgtttggggtccctgtgcctctcacagtcatgttttcagagttttgggagatctgggctggtttccctcttgccatggttcatgctggggtgtggccaacatggcagcatctcccctgccctcccagatttcaggttggagggagttcggcttcagagagacaatccacaggcctgcagatttcctcccatgcagacctcagtgcaagataaagtcaggcaaggctgtgccacagcacaacagcataataaatccccctctggcctcctcccagacttattgttctattgcagttgttttgaatatgatcaaaaggaaggaagagactatgctatcagactgaggaagaaggatgctctcctgaccgctcctgttgcccttggccaccttattttaaatatgaggaaaccaaagggcaacgtgcagcctaaccccatccacatcatgaggagtgatgagctgcagccaaggccccatggagctttggtgaggcagcaacccctgtgcaaactcgctgacagctaccttagatgtccagccctgtccttttacacaccatggggggctggaaggcccaagcacagggtcagcagcactttgaggctggagccggaagtaggccctggagcagctgaggtagctgatgttaaccccttggactgagaactaaggctgtaaggccacaaccgttggaaataatgggccagaacaggaactgcccaagctcagctggcccggtgcccacttctcaagatagtgaatggctcaagttctttggaaatgttgtcaatgtcagggctttggccttgcctatgtgcagcccaggttcaggcacaggcatggggtgggctgtgacatcggccaccactgctggattcctgcaaggaactagagcagaaagcagcgacttgccttagccttcaaaggtagaaagggcggagccgagtgttcctcttcacagacttgcaggctcacacagtcctctgccctgcccaatgcccagatgctgattcgccaggtgcctggctgccacagcccggtcacctttatctgggctggaaggccacgtctgagccatcaaaggagcctcaatgggaggggacgtcaatgtgcttcctcaaccagaaaggtggtttgagtttggccaaagcagcccaaccaaataagtaaaagcctgtcaatggaaagatgggggctgctgggagatcacacgacaacagaatgagaaccattatcagtctcatcccagcctgaaggagggagagcctttgaagccacagacaggctgaacagaactttccacctgagagacgctggagatgggaggtcaggctgcactcagcccctacgaaaactgatcaaagcctgctgcagaagggaggggggcgcacagctgcagttccgactccccccacgggccgcccgggactttctgaaggcaacagggctgcctttgcagggccctgtgggaaaacccaacacagatgcacattgcagccaaacccccaagcactgctgggagagggaaaaataaacccctcaatagtcctgaaaagaaaagggagggaatcaaagcacacaaaaaatgcaaagaccacccacctgatgagtgcctacctttcggaaacaaataactcctggcttccaaggcgcacttctaaaagaacagacggactgaacactgcctcaaagctgcatgcaccaggggatttgtgggaagctgtggccccttctaagcatcggaagcttaatttaaagtgtgttggcctctgcggtgcctattcaagggctcccttgcatccgctgtcctccctgggaacctgggagacaagaatcctcatttagaaaaggacaggatcctgtgtggactcctttatcgtggttctctcagacaggacagccatatctgccagggaacattctagggggcatctttcaggctagatccagggtgatgtgggcccctgcgagggcatcttggaaggctgtgttggttctgcctggactggtccctctgggacagcctcagcctaccctgcctggcctcacccctcctccctctgacctgaagctcctttggaggactgacacttcatggagcctgcagtttgatcttttctgaagtggagacaacaaagcaaagccacttccactgtgtgctctctcaaaagaataggaaagctcttctctcctccttgggaatggatttggagggagggtggagggcgtaatgatggggaggccttggaggtattttggtggaggagggtgtgtgtggaggaaatgagccgcccaggagcatgggagaaattgacatgagaacatttcagaagcactggtttaaccggctgacattctttccaaaatggatggacaagcctttaggagtagacagagggcctcagggaggagaaacagctgaggaggaggcatctcccttccccctcctccagaggctgatgctacagagaaggcggcaaggcctcactgagcgcctacccaccactcactagatttctatctttttattaccttaccctgggagatgaatggggttatctccattttccaggtgacaaacagagattcagagaggtgacgagaggctctccaaggacccatatggaagtgtcagctggaattcaaccctcaggcagcctggctccaaagttcacaacctttcctacttgtttcagccctgccctgcctttcagggctaagaagatgttagtagatgttccataaatatttattaaattgaactgaactcagcagctgaacacacgcaggcctcttccaccctgaccaagaggaatcctttgagggtctgcagtatggaaagaaattctctgaggcgctaaataaaatcctgctctgaggtgcaaggaggacttttttgaaattaatagctaacaaagtttatgcagaccccaaaaggaaaaacagaaaggaattggaatcattttaaaaacagagtcggtagataataaaacttcacggtggtggtgttgtctttcatcaagaagcacgaagtgctcacaggctttaattacatcttcatccctacggccccttctgaagtcggtagatgcacgttaatagtacctttcgttttaggcatggacacattccggtaccagaagctttagcaattctccccaaggcaagcagagtacagagctggatcggggcgcaatgactctccaggccagcatcccatgctacctccagttgtatttcctgactccgcagctgaaaccaaggacttcattgacatatttaggggtagggggatctgaaggtctaggaaagaaggtgggcaaaaccaaggaatcaggcctccactttggcctgcacaccatataaatcccctctttgttcacccatatgcacattctttaatttaggcatggtttccatttgtgtacatcaatgagtttgctcagtcacaagggtgccgaagcctgagctggaccactcactttaggtaatgccacagcagacaatcagtgcctctgatcatgaagactggagaaatgtgtctgggctgggcccatgcatgatgcttgggagggaaactctcccagtggactctgcgactgggatgtggaagctcagacagctagagatgggaaaggaaacttaaattgcaaaggagtaatcctttttttttctttctttttttttttttttttttttttttgctagttcattttcaatcattcatttcctggcttaaaaaataattaatagtaataatcgcatatggctttttaatggctctccattgccaaatactatttaagcacaaatttcttcactagacactggagcccaatctacacacttgatggtgtggctccatctgggaccccagtctcatttcttgttcttaatttctgtacagttattcctaatttgtgaactgcagacctgcaagaggccagggcgtttcagcaaggggtccataactcttagtgccacaccaaacatgggcagcagctgaaatccatagtatgtaaaactcaggcgaatttgaaaggccgttaaattcctagcagctctttgtcattacgtgttttcttgggtacgaagtttgacaattgttacaagaaggggcctgcattgtgataacagttttcaacctgggatccaaggaaccccacggagattccctgaagtatagatggagggagcacgaggatggagcaggagcagatggggacaccccatgcccgcacacacacagctaattcatccctgtaaccagagagactgttttgatcagttttgtacactgggctttctagtaagattttatttgaagaaaggactctgccacagaggtgagtggggtagtttgcaagcaatggctgcagacaaagtacatgtatttctagccagtcccttgccacagttcagtggggcacagtgagaaatctgtcagctgcccgctctgtccagatccacacagtaagaactctgggtttgttagtgtcttagatgcattaagtcccatctggctcttagaaataacaaatgaacttgtagattagccaatcttttttttttttttttttttttgagacggagtctcgctccgttgcccaggctggagggcagtggcatgatctcggctcactgcaacctctacctctctggttcaagcaattcccctgcctcagcctcccgagtagctgggattacaggcatgcaccaccatgcctggccaacttttttgtatttttaatagagatggggtttcaccatgttggccagactggtctcgaactcccaacctcaggaaatccgcccgcctcggcctcccaaagtgttgggattacaggcgtgagcgaccgcgcccagccagattagccaatcttattgtcagtgcaaagacagtatccactttgcatatgtactgctgagggaatcattagaacattcactgctgctgagggtcaggtggggaattctttatataccagcttttcttgtgggccaaaatccctagagggatagtggccacttggggtccatttttatctccttcagtttctacccaaatgtgtctttgcttatgtggctggggcctgccactcaggctttcaggacacagtgtgcccccaggcagcctgggcctagaacagttgtagtaataagaggtgacaaagcaggaccttgagacagaacttccagaaattctttagctgagcctccgtcctcccagccaggtttcagacaggatgacacataaagaaatctctgaacaatccagagcagtgcacattagcgagtgaagctcaggcaggaaatgggaaggaatgcctttgtctctgctttccaccctgccacccatagctcattctcaaaagccacctccccaacactcaggctcggggtaaatgctacaaaacgtggtggaaacctctcacgacctcctctctgttgcatgaacgcctgttagaggcgaaggaaaacaatggcaaacagacccaggcctgtcacagctgtactggggccagctggaatgtggctgtgcgtgcgcgtgcatgtgtgcgtgcacgccggtgcacacgtgggaatataaacatccttggctccccagctcctgtgtgctggatcgtgctgagtgggcgcaaagttctgcatgtgtccgaggcagggaggggcagcaccagcacacctaggcgctctcatttatacattgaaaggcgggtgggggggacaaaggagaaggtttgggaatggctggctgtgtgcccgtgtatgtatgggcacatctcattgttgatatgtcttgggggaaattgagggaaattttgtgcttgggtatgtgtgcacacatggtaggcgcccacactcaagtgtgcagagggggaagctgaaagaaagtttcgagattctgtgaacattctcagttagaaaaaaatctggcaactccccataccacaggtgggtacacattcaatgcttgtgaagttcatttcctgtactagttaccagcccttgtttatacaggacacaagatgtgcttggtagcaaaagctctaggtctccggggtgagttgagggagagtgtgtatgtggagggggtggggagggagtgtgggcatcaccgcacaggtgctcttgaagtacacatgaaatcaattttcaatattaatccataattccactcatatatgttcagaggggagagaaagtagagctctaattttagaatgaccccctccttcattgctccagtgctgttttagcacccaatctgctcgggccagtggcagctcgggtgtcctcgtgtgtgtttatgggtttgaaacgcatctggcttgttcttctttgagctttactttgtgagcccagccccaggaagtgtttatgagctttttcactttgctttattctggctcagctttgtttggtagcacagaagggtagagtttgacataaatactctgttctttgtgtgagggcttcagattgcagagggtcctaggactggcattccataggaaagttgaggagtttgacccaaccccatgatcacacacctgtaagcgaacattctgcacacctcaatatgagaagaaactgcactctctaaacaaactcctgggcacgtgacctcctcagagtctacttgccagtttgttcatccagatggtgaccagctcacaatagacactcagtgactgctaattaaccatggaatattccattccactgcattaccaaagtgccagcatcactcctcagcatagctcaggaccttgtccaatcagctgtcttgaacacccactttgatccacggttcacgttcatgttatagtcatgagcccctgctcctccgccagtctagactcaaggaagcagtggcacaaatctcctggctgttgggttccatggagcagagagcctgaacccacccggaaaccaagtctagacaaaacagagctttgaggtttacacccacaacctttgtaccgtcggaagcagagggtgccaggggatccactacacgctccctgggaagcagaagccagaggtgtcgtgctatttctccatctggccaagggtttaaccctgctgaagactatttctgaggggagtctccatgatgaggggacccaaagatgctgatggggtcatttcccaggctctgttctggtccagtgcagggctccagttgttgatggtgatggaagtttgctttatacttggtccctgcttggttggagtcctctgccaccctctggcaattcacaacatctagtcacttggagacctctgaacaatagcaggactctaaagactgggacccatggctcctcagtgaattctgaaactgctttgaggtgctgcctaaagttcaaggagaagcttaccaaggaacggggacctggggacagcaatggaaatagagacagtgaggtacaggccactcgctatcctttgtaggaactttcagctcctgttagctagagaccgttgcagagtcaacattctacgcaagccagcgtggcaccctgcttgtctatgattctattcaaggcccagacataaccagccttcatgggcttccagaccactgagattgcagcctggggtgacctcctaccctgtctggaagggtctccaccccaggcctggtcctgcaggaaatggttcccgtggggagaactcctactgctccaaggcagcagcttccttggtgtcatcagtttacctgccagtctcatctctgagagggtaccagtttctttggcttccccgcctgtccccagaatgattccaacacttttttagcccctgaaagccttggaagggtgcccacttgcatttctagtgaatagcatttccactggaggcccttcacccagggttccctacaaaggggtttgcttttagggaagggcaaggtgaccctgctttgtcctcctgaagcaccacttgtggctctccatcactgtgcctgccatgcaatcataatcctcccctttctgtctctgccccgctagcctagaagtgcctgaaggcaagagctgtcttagaggcacactgggaaaatagggggccctgggtcctgattgagtgagggcccagctagggccagagggcctgggctcaccagccactgggcctggataaaggtggttttcaaggggtgagtgtagtctggcctgtctgattctcatccccactctctgatagtgctatgtttttcaccttgaaaatgaagacatactaccctgagcccttcactgggttgtcaagtggtcgtgtggcacacgtaagggagcattgccatgttaaagctccccagctcccttcattatggccatcccatggacagaggaccatgctgtgactcagaggcccagctcttcctagctgtgctgttccctgagtgaacttcagtgagttgctttatctcagtgactctgtttcatctgtgaaatgggactgtcgggttgtcagggcaagtacttggaaccttcactgagtggtatggttgtgggcattccttcttattgtcattgcttaaataagcatgaagatactttcctgaagaatgatgtttggaaggaaggaacctagactttggtatggggtgggaatggagtaaatcctaaatccatcccttgttaacaggcttgtaagtggaattcttgcctagcgagatctaggatagttctctagctcaggagtcagcaaatgtttactgtaaaggggcagatagtgactatttttggccttgcaggccacagggtctctaccacaactgcaaggcagccatggacaatacataaacaaatggacatggccttgttccaggaggactttatttacatcgggctgcaggccggatttgaccagtcggccatggtttgcttacccctgctttagcttatggggggtgccccgcaagcacttgggaaattaatttgttgaagataggtgagtagaggcctctgatagtccagatcctcggttttagctctgtttacacaggaccaggttctgtgttcttgccactgagtcacagctgcaagaccctcacctccccctagccccactcccccagctttgagtgatcccaggctccttcaagcccactgctgagtggggagcagtttctgtgccttccaggatctgtctcccctactgccactccccatccagggctttttccctccatcctgagtttgtgggacacacaatttgtaatctccttaaaactgaagaagtgaggtctctgattcatgcagattaaaatcagctgcaacctattaatggcccagggcccaagacagattttaggaaacaaaaacactggaccaaattagactgagccggcctctgtctccagggaagggaggtagagtaggaggctgggggcgggggagtggccatgtggttttcattactttggattctcttcctgaagcgaagtcacccaacacaaagtgtatggagcgccaaggcagcggccagcctctggagcccggctctccctggtagaagccctgggtcctgttggggggctctggctggttgtgtgtctgtaattaacaggtttcaaagtggttattttggaaaagagaatttcagtggcgcgtcaaaatcctttcatcagccatcagctgccgtcccgaggccttcagcaaggcctgagccacttaaggcttctgagagctttaaattcccagggtcctgtttgagaatgtggaggcttttgccatgggttttattgggctgatggttgccatgattttcattatgttatttggttcctgggatcataaaaatgtttgcctcttcctatagtacctaggatcattgaaaagaaaagggataaaaaagcccctgcatttgtagctgctacatagcatacaaaccatggcttccttgagggaaaagggccagctctggctctgggctagggaaaatcatcaaactggaagggacaggacaagcagccacacccagtctccacctccctcccatccaaggacactgaggcccagagagatgctcatctaaagctggtctggaatcctggtcccactctcggtcaggtgctctttctctccctggtgacttgaggctgtgagtagagttgggaaaggtaaaggagtctgaattctgctgaactagtgctttgggacacctctaggagtggaagaaatggtcagatttacaggcagcataaagtgaaatgctgaagtggacagaggaatgatccgggccagcctgggcattctcatggcctacaggacagagcgcttctctgaggctggaagggttactgcagccttcacttggcacccacagccctgagacatggaaagaagggaaacaggtaccaaatcccacaagcctcagagatgatttctcactgctttgaatatgaaacctctgaaatctggtcaagctcccagaatcaccctagggggtgacaggaattttggttaagcccgtattatctgataagtggaacactaacctggctttacttcctattttgatgatggctaccttccagaaccttctttcatggaaaacatgaaaaatattctgggagaattgctattaaataacctctgctgtttaaaaacaaggccagaccagcagaccttgctctcagcaggacacatgtaagaactagtctacaataaagaagctattaaggcgtgttcagagaattagagagtgttggagctgagagggaaattggagttcagctaggccaggctttcattttacagatagggaaactgaggcctcagggcatatccaaagtgatctagggggcatagggagtccaggatttgcttgactatctcattcttcacaaggccactgttccccttttgggttgatattgtaattcattcattcattcattcattcattcagtttttactacctcctatgtgtcagatgcttctaggcactgctaattttgtttctttgaagtttctagaggtggaataaaacagacacatttctgtggactacattaaagaaggaaaggacttttccccccaaaatctaggtttggggaaagtctggtgacttttgtgagcctggggcatctttgggaaacgcctgccctcttgagtgtgcctttcagatgagtgcgaaatatcattgtcagataaaggggtgacttgcctaggctgcccccacttgcagtgacccccactcccaacagccacctggcagtgtggcccaaaggaatctggaagtgaacatcagcagagattctctggatccaaatttgagtgagggctggcgggaacccagactagctggaggctgcagattgcatgggtctctccgtctgtttctcatcattctcctcctacggtttgcttgtcagtcctttgctcttgtttacctctatgtggataattcctcgattataaatcagagaacttggcactgagttctggattatctgtgatctttaactttcccagggcaaaagaaattaaaccagcaaatctctttgtttctcatggttcagcatccaaatcatggaagtgcgggtctgtgtagagtgagacagcctaagcccacctctgccctggcccccacactctaggtgagcagtcatgcatgcatgcattcatttattcactcaacaaatattcagtgagcacccatgtggcagcctctcttctagaaactggagatacagggttaaaaaaaggacactgttccttcttaccctgtttgcatcttagtatggatgacagtaagcaaacaaaccaacaaacatacatactagtgataaatgccttgagaaaggaagcaggttaagagatggcagtgaggggtgcactattttacacacagtggggtcaggaagacctctctgaagaggtgacatttgagcagagattggatgaagagagagtaagcaatgttcaatccagaaagaacatttcaagcagaaggaatagcaagtgcaaaggcctggaataggaacaagtgtgatgtgtttggggaacagtaaggaagccagagactggagtagagtgaaaaaaggggacaactgtgatacattaggtcagagcagtgggcaggggccagccatggaagtggtgactttgggttttgttctgagcttcacaggatgtccttggaggttttggaggagagtgatgcagcaaagatgaacattcagaggctatagagaggctcatggaacaacaatgggccagcttgggttaaacactggcattcagacacatggcaatggtagctgcacctcatgggtggtgcttccagtgggaactgttgagagctacatgtttcgacagggtgaggctgggcctgggagctcactacctctaccaattagtgttaagcccagaaaaaggaaatgctgcagtttaaattgtagggttggaacctgtgagtcatataagccccagccaaatgggccatggtgggctctgggaagttactggtgcagggtctgaagcccccagctgggctgtttggccacccatgggggcttccagacacattcggaagaagcagactcaaatacagaccccacctttggggtctggctttatttttggctgactgtatactgtctggtcagtttccttcccagtgtcttttactttggaaaaggcaggccacctcacaggggagcagagagaaagggggaaacacatggatttggggctcaatcagccccacaacacaaccctcacctcatcacttcgctggcttttggaaaagctactgaacctcccagagctgccagccacatgtggctgttcacatttaaatcaatttaagtgaaataaaattttaaaattttgttcctcagtttcacttaccacatttcaagggctgaatagcaacatggggcttgtggctatctattggacgtgagatgtagaagatttcccttatggcaggaagctctgttgaacagtttcatttctttaaaaaggaagcaatccacgagaactgaacaagttaacacacacaaagcacaaggtgtttgcctgtctcactacaggtgctcagcaaacggtggtcactgtgattgatcatgtgaatctccatcctcgctctgctactgactagctatgtggcaagtcattcaacgtctctgagcctctgttttctgatatgtaaaatgggaataaaaattaccgcggagcacatttccacagcataacatgatcctttttttcttagttctctctggacccatgagaacttccttaccaaccctcagctgacctatctagaccagagcttggaaactccagtcttgcagcacttagcaggaagcaggacctactgtggcccaataatgcagtctggagattttggccattttgaagggtttgaccatggctagtggtatggagttccaatgaaacaagtggacaaatctgatcaagaaaaataatcatttgactcaaatcagatatttaccctgctctgacgctctgaaagacatcatgccttgggttccccagctccaggccccggcttccctggctaaaagttcctcctgtgggcgcggctctcagagaggggctcccaggcagcccttctagtatctcagcctcgaatcagtcttccattttccacttggggtttttgttgttgcttaaacgtttattaactgcaggcatttggcgggtggaagttgggatttgcctggggctggaaggaagttatttgccaggccaggataaggtgtggtttcagagttgaaactggaatccccttcacctgcttaatgcatttcaggggagatttgttttcaactcccaaattacctgctaggaattctagacctgagatcctatctcactggctgttttctttcatttccgataagaaatacaaagaaaaaagagtgaaaggctcaaacacgacattcttgcactctcttaaataaaattacatacagtgagtgattttcttccctgtcttctacaaagcaggtaatgggagggcctgacctagcccagaaaacctctgctcctggggaggtgtgcctgggagctgcagagagcaggtgatactaaagatatttcttatgtgcttgttggccatttgtgtatcttattggaatataatttattttcaaatattaattttatgtccagcaatcttactaacctttcctttagtttaataatttatttttaattttgggggtattttctatgtacaaatcatacaaaggttatggggagtgttaaaactcataagggagtctccagtaatctcaagttcagaagaaacagagctagaaggacctgtgtccaagcttgtggagggtaagtgagcaagaagttgcctaaatgatggtctaactatgagcaacgggacaaagatagacagcaaagacatttcagacatatggaccaataatttcttttcttcctttcttcttcttcttcttttttttttttttttttttagagagatagggtctccctctgtcatccaggctggagtgcagtggtgcaatcacaattcactgtagcctcaacctcctgggattaagtgatctttcagcctcagtctctcaagttgctaggactacaggtgtgcaccaccattcctggcttttttttttttcttttagagatggggtctcgctatgttgcccaggcttgttttaaactcctggcctcaaatgatcatctcacctcagcctcccaaagtgatgggattacaggtatgagccacccaggtgaaccaatttctttctttctttctttcttttcttttctttttttttttttttttgagacagagtctcactctgtcgcccaggctggagtgctggagtgcagtggcatgatctcggctcactgcaagctctgcctcccaggttcatgccattctcctgcctcagcctcccgagtagctgggaccacaggcacccaccaccatgcccgggtaattttttgtatttttagtagagacggggtttcaccatgttagccaggatggtctcgatctcctgaccttgtggtccgcccacctcggcctcccaaagtgctaggattacgggcgtgagccaccacgccctgcccggaagctggacccatttctttaggctggcaactcaagtgattattgttgttttaagccactaggttttaggatactttgctatacagcaatagataattaaataatttaccatattaaaaactaaaaccaaaaataatatttgttcatttaatatttattcattgttaatgaataaattaacatttagtaatttattaaaatgcatatattcattaatccatttaaacgttaaaaataacattttattataaaaataacttttttaaaaaatccaagtgagaagagtgacagtgttttacatttttgcaaatctcttgactgtccggcttaatagaagacagctggattctcatatcggcttctgcattcaatcagctgtgataatgttgttttggataaagtatgcgaaggaaacccagcctcacgtagttattttgttggaaaagggaggaatattttaatagtcttttcagataattgtgaatattcttctttgacattataccaaaactcaaccaatagtagattactaaggttagttgcaatgtggaatctgaaactatatcaatgaactttttgtgctcagttatgttaaaattcagttatctggcttgtactctgaatagatcttttgctcatgcatgattttgaaataatatgcatgggtcatttggaaaatattgcttcactaagtcatgcagatttttcaaatttgatatatttcttgatgaaaactaaaagttcttatttgttaatatcactgatctcatcaaaaacctctgtaagtgttgggaaggtgttaagttcactatggcagatacaggtttctaaaaattctaatttttgctttatacttctattttggcagaaaatactgttaattattgtctttcttgaagtgatgagctcagtttgttcatttttgagaaaatgcctgtcaaataaccaaatctgaataactatggttatttggtccttttgagtaaacattgtgttccatgaaagtgactagtgcagatcacaactcaggacactcacacaagtgcttttcctccagatgaccatcatacttcaggatgcaccagaaatgcttgatactttgtttccaagtcatcacacaaagaaaagaaagggaagggaagggaaggaaaggaaagggaaggggaaggggaagggaggcagagaggggagaggaggggaggagagaaaaagtaccttttgggcaaggttttataaaattaataatttttactgtctaatttaggacattctttggtgaaactggcatttattccccctgtaagtttgtagcagtgaagaatgccgtgactgccagcatagtctagcaccagcaattttacccagatgtcaacacagtgaagaaggcaaataacatcttggtattattatgaaatattatcaaaattatgaaaataattttgagcttgcagacaccctgatagggtctcagggatcccaggggactgcagacctcacttggagaatcagtgctttagggagatggctgtcattctgctacttgtagcatttacaggtaaatgtgctacatgctaagacgtatatgtaccaggtctttgtgcaaaattgtaatcaccaccatttattgcataaactagaaaacatatcattaggtatcagcttattcttgtagatggactagatatgagaaaggcgttttatttaagggagatatttttatgcttttatttgtcccacttgtcaaaggtatatggatattggtgaggaagctaggctctaagccatttctgaaactatcagtgttgaataaataaggtacataaggaagctaacacttgcaccccttcctttgtaactcttctaccgccttgatctagtgagccctgaaagctcagtgggctgaggaaaacatcctttttagagtagcagggtgccctcaactccagtctagaagtgggcaaagttctcacgttggcagtacctgcagtgtgggacaagagaagcagctggcccagaaggcagcgtttgttcaaatggtcatggcacctgtgagcattgtattgccgtggaagagctcaagtcattgcctctgctaaagtgcctctgaattcctacacagtgaacttagagcacaacagggcgggaacatggttgttttccattcttgttcagctaggcttacacatcctctcactcccaaaaggcagagtaggcttgcaccccacacctgactgggctcagctctttggcaagtgattgcgtagctgttctgcctgtgactgcaggccccggtctgcaggcgggaaacaacaggcagttgtgtcctgagccctgggaactggagatctttccacatctgttcgcctagtcggggggcgggaggaaatcaccagaaccttcaaacatggggccagagcagggagacaaaggggaagccttaagccgatggtgaccccaggtcatatgagccccccccccaggcctcccccatccactttcatcccctcaggtccccgacactcagccttttcatccttctccaggtcagcaggatcaggttaatgtgacttgaccagaaagcttatcaaatgaaggcagagacaggtgtttgaaaccccttccctgctgaaagctgggttgaacaaggttagcagcgtagctgaggccaacatcctacactaattgcattttctttcttggagctccttctcttccccttctttgttctctggcttggaacccctcaaggtctccgagagccagtaaccaaaacaaaccattcaaaaaacgaaggatttagggaaaaaaaattaggggatgtgacattctggaccaaacagtggcccttctatgccagagcctaggaaccagcatttggaggcatccggccacttccacccagtgggcatgctgaaatcagttactatgggcttatcagaactgattgcacaaaccttttcccaacttcacaatcatgatgtcatatttgtagcttgagttgaccaaggtgggaatatttataccacagaaatcagcaagctacaaaccaggcttttccacctccagagccagttgttaaacatttaccggcacaccagtgcctccactgtggctattgtcactcaaagtatgattctcagaccaattacataggaatttcctagagatcagaaatgaggtggggcaggagggttgttatttaacatgcagatttcctggccaacctgaattaactgaatcagattctctggaggtagagcctggggaaatgctttttagcaagtccctgaggttattaataaattcaataaagtttgagacttcagccttagggaataggagaaaagagtgggcgtgcatctgactcttggcatctggaaggaacagctggcttcagtcccagttggcctaagaatggacagctgttttctctcgagatagaaacttcatgacaggaaaagaggtgggaattttggggtctcagctacccactgacaacacgactggttctgccttggatctcaggatgaatccattttccaacttgagactttgacccaagacagcatgagcaaatgcccagatgtatgtagaacgtggagaaagtcaccgtcatttgcaccattggtgggaccagtggagcccagggaaagcccagagtcagttttctgtattagattgcccaggacagcatttttctttcagatttgtctagacattttcaggatctttcccaatcaggcatgattttgtaaagcaaagaccttgttgacttcatcccactgagctggaagagaaggtcttctaaggcagaaagaaaaagagaaaaaaaggagaagagagaacgtttctttgcctagatgtaaaacagaaagttcataaggagcttaactctgctttcgccttgttttgcacctgcctgagggagtggtttagacggggacaagtagtgtgaaaacagagctagttagtaaatgcaagagctggggtttggaccccaatttttacagccaaaacaaaacaaacaaacaaacaaacaaagaccaatgcactttcctcctaagcacaatgcagtattttttccacatgcagttggaacccagaggaatccttaatgggcaactggggtagtgacataggacatatatgctcaaagtactgtgaattcctaaaccatcagagcccccataccctggtgcaaattccaaaacataatccaaagccacatgtaaaacttatgggattataggcaagtaaattatgaactattagattactggctattagattatccactggaatggataactgagagtcaaccatattgatacatatcatttaggcactccccatattagacagttaagcttgtagctgtttgctaagttcatgatcatgtgatcatttcctatacatttgttctaactgttcagggctttaattaaacatataacttcatcaaataggaggaggaagaaaccaaatagctcctcaggaaaacaagatatgagctcatatgtattttttgccaggtttcatggcctttctttgtgcccagaaactcttcctcaccctaggacccatcttcactttaatactatccattcaacaaatacatagtgaggacctactgtgtgccagttagggtgtggggaagaacaggagacaaaccacctggtctcattctcatgaattttacagtctattgggaaacaggtattacacaagtcaatatgaaaataagtaagtgattatacattgtcctaagggctgtgaaagaaaagtacaaggtacaaagagaaacgtcaatagtcctgaaaggttgactgcatcaagaacatgtccatggagaccaggctgatggagtttttgtttggattgttttgggtggcagggggtaggggtaagggcacatggagcgttttgtttgaggtacttgaaagggagatgtcaagtaggcaactgaatatccaaatcaagagagtctgtagtggagtggtgactcaagcccgcacctggatgaggtcatagggatggaatgtctgaggagaggcaacagctggggcctgctctctgggccacccatatgcagagctcacgaaggaggcactcccagagaggagggagtcccagaagccatttacaaagggtattttatgagtgggcaacgtgaaagtaccaacatcagaaaagcacctcaggacctccaggtcctgactccccactcctcccttctcatgagccaggcaggctgtctgcaggccagccagtgaattgaactggggctctcagagtctgaacagctggccatgtcttggacagtgcttcatgactctaagttattactttctgttcctttcctagtccctaactcagacccaagctctttgctccctggagtttctaagtgtgtaggtattaggaagagagcaaataaaccagttcacacagatgtatgaataatgtttaaccagccagttctctttgagatatattgttgtaaagaagcaaaactaaatgtctaatctgtggaatttcaggcaaccttatacgtttcaggtggtgcccttgagagggaagaccttttgagctggggctgccaccctgttcccttctagcttccctgcactgttcctgcagcagcttcttttcttcctccatttctgaatccccagagtcttgaaaacctccagaattttcagagtggttcctttggcaccagtggccatgcatctgacaattacagtagctaacatttatatgtaattgttagcccctcatattaaacctacattaaccctatgttaaatgaagttaaccataacatagggttgctgtgacttcacagcaaacttcagccctatgttaactgacttcacagcaacgctataaggttgggtcggttactcttctctgggtgaggctgtggctggatgagagatgtttgttagctgcctgtggacacacagctggcaggctgaaatttgaagcagcgtcttgctcccagtccacactcagggccgtgtgagtgggatgtgagcctgagtctgccctcccttgggtttgctgtcctgagagaacaaaagcaaatccgtgttctggttctctgagatagctcttactagacctggctcagtttgacccctttctgctgctggaaaggaggacagtgcaggtcaaagccctggttgctgattacagacaagatgggagtcatgtggggtgtcagcttctgtctcctgagagagaaaaccgaaaaatgctacctgaatttccaggatgaggttgaaggcacaatcttttcaggccaaatctcttgggcagaattgaagagactgcaaaaaaaatatggaagttaccctcaccgtttctgggatgtctgaattcctccctctctggaatggagccgctggaaggctccataatcctccctctcctggctcagaggcccagctacactttctaaaacaacccagagccatctgatttcaagcatgtaccggctcgtgtgtggaagacagtaattacctccattccagttaggaaagctgaaacctgcctttttcatgcctcaaacaattatcgaagtgccttttgaagctctggatagaagagaaaagcaaaacaaaccaaagagccaattagagcctgggatttgagggtggcttagttttgtgcagtgggacttgggaggaactgtgggagagggtcagaggtcaccccaaacctccagctgccaaccaactttgcctgtgccaaaagaacattattttgcattgaaaatcaaggctcctctccctgactcaggaacaatttgcaggaacaacctctgcatcagctgtgaagagggctccctgattaaataaggcctggaatgcatttgatgttgaacaaaacagttctctgacagcttttcttacttgccattagaatgcttccccttcagctgaaacttggtaagataaagtgaatccccggggacccttttgttttggtgtacatatttgaggaatttttgtggcctgtgttccatttggagttaaggttcttggtccctgaagttcttccaggcttggtggtagaagctggcaattcagaggcaggctgtgatgagagtagaaagcggataccaggcatgagggcagaggagagcaagtggccctgccctgggatgggaagcctgagggcttttttacagtccccaaggagagttccctgacattcaacactgccacaaggcgcagagtggaaagtggagttggggcatggtggggttgaagctggattagaatggacttggccaagatctgttcgtgatgtctggggtggccttttggattaacaggatttgattcactgtgaaggcaacgtagcactgtctgggaggttcccttttgagtttgggtgagaatcaggaagacagccagcaccaaagagccctgagagaacccactatgccttatttacatccctaacccaaactggatagaggagctttctcttggccctggcataagtgcccggctttccatctgcctatcatttaccccctcaacagtgggctttgatgtctaccctccactacaagaaaaagcatttgtaggaatgcctcttggtgtatgtgggggactgccccttagtatagggaaagttgtcctccatacacaaaggttttgtatcctgcaagtgctgtattttctatctgtgtttggttgaaaaaacaaaaacctacatataagtagacccaggcagttcaagtccatgttgttcaagggtcaaatgtattcctataaagcaaaacaaagaagcatattgcttaggaatgtgtctgtcgtgctcaaaatggagtgaatatcaatggtctggtggcatcaaaatggccagttctgtgacagtaaaagaggtttgtgtcttatttaatcttttgataataataacagctatggtgtatcacagctttaccaagtaccagacactgttctaagggctttgcatggttcactcactccttacgtcatccctcggtggcaggtgctgtaattatccttatattgcagacaaggacattgagacagaggtcaagccaccttcccaagggcacacatggcatctgcactgctcctgaccgaccgacagagagagctgctgtcacgatcctcaaatgagctatgcatgtcaaaagtttaaaaataaaaaagataaaaacatgcacaaaatttaaaaagtaaaccatttcaggctggacagactgaaactgagagatggccagagaagagtatgaaagataaatctatggacagagtaaaccctgactggcttgaaattagggcccttactcctccacactcctgacgggttggttcaagaccaagaaatagaagcacattgtgagttctacgctgctgccctgggaaacacacaggctaaacacacccacaggctcgagctggctttgaagttgtgcctaacagatccgagatgcatgatgaaggaatgttctggatgcgttcttctgagattttagaactgagttaactcacgttctcctacaaactgtcccttgtagtcgctgttcagaaggattccaggctgcctgtgtcaatgatttgaccccacaggatggttcttttttaggttctgacagggagcagaaatgagttttttgactcaagaagatggacgtagctgtagttctttaaaaaccatttatgtgatttccagtgttttctctgaggcaggtctccaacgatttctctccagcatgtggcagagaccaccagctgcttagcaggccctcaactgggccaagaatgttcgtgataggggtttccaccctttccatctgtggcctgtgataggcagagtaatggcctcccaaagacgtccaagtcctgatcctttgaacctgtgcatatgttacatggtgagggagaattaaggaagcaaaaaaggtgctaatcagttggctttgggatagaaagcttgtccttggccaagcataatcacaagggtcccagtatgtggaagagagaggcagaaaactcaatgtcagtaaagcgatgtaagaaagactcaatgggccattatcagctttggagatggaaggggccataagccgaggactgagggccacctctagaagctggaaaaggcaagcaaatggatgttcctctagagcctctagaaaggaacatcgccttccagatgtcttaattttagcccagtgagacccatgtcagacttttggcctccagaattataagataaattttccttgctttaagccattccattagtggtaacttttacaacagcaataagaaagtaattcaaagttatctgggttttcaaccctcaggtcataggacctggaggacattgtcccatgagctgggaagtgaaaatcatggtggtcaccttagcatccttcccactgaccatctgggaattctcatggttctcctggctaagccccacctgcatatgagcacttcagccatcagagtttccctgcaatggggtctcttcttgacgagtgatgttccatttcttagcagtgttgccagggcctctccttagtgtggtccagacatcctatagcattacaacaagctgcttttcacacccacactcgccccaaatgccaaacacttccagccagcacagggtctgggggatttttctccccttccagatagccagccacaacttcaatgagctccggcatatggaattagcatgatagaaccatgacatgccaagtgccgggagccaacctgagccattcttgggtttgagaagttatcaactgggaaatacttgtgatttacaattttcttctgtcctccaccattccatcacatgaacatccaagtcaaactcctgagctgggttaagaaattggaattcctgaggctctggttcaggttcttactacctctgtgacattgggaaagttggttaccatcatagcgcctcagttttcttatctgtaaaatggggaaaatacatgagttaatatatgtcaagtgcttagtgaactgtctgggtcatgttcagtgctataaaaatgttcattgttgttgttgctgttgtttctatcgttgttattattaaatgggtcccaaatcttgaggcaagtcatttggaaaaccagcttgttcgtgctttgccacatatagtcatgtgccacataacaatgttttggtcaacaactgaccacatacaggactatatagcctaggtgtgtagtagactataccatctaggttgtgtaagtatactggacgatgtttccacagcaacaaacccacctaatgatatatttctcagaacgtgtcgttaagcgacatgtgaccgtattatacgtccagcaattgagatgaattaccgttgcacacagtgctgaagctcaggtgtggacaccctcttttaaaatatttttcccatgaacatgtcctccaggaagcaggctccagtgtgtcacagccagatgagtgattgttagggaagacaaagcctgtgtttagagttatgcaagtatagtggggagagggcatcttattgctgactcacgcccactggcaacccagcctgattcatctagactgctgcagaccactctgcatggaagacctctgctcagaggatctcagcccactgcatggcccaccaagagcctctgacattcaggccgcttggttcttctggattcagttcttaggtccccgaaagtggtaaaggagagaggagaaaactagttcattttcagccaggagtggcccctggcacacgggacactgcttgctttggacagaggccactcacaacaggcttccccttctgggtgtggtggccagcctgccctgacaacagtgcggcctgaatctgtgactcttagcggctgcttgggactgctgcaagactctttggtctgtgacttgcccaagagagaagtttctgggcagaacggggagctcaggaaagaagaaagttacatccgcacaaagtttcaattataaagcccaataataacgatgaccaaaacaaaacaaaaaacgaaacaaaatgaaaaagcctacatgctctttggtattgttgggactgaaaacaatggaactgagtttcttgactttttcttaaccttatccccatgaaagaggtttgaattacagtatttttcaaagtaaaagccatctgaacagctgcctgaactaacctgggagcctagacagtttagcttcttgacctctgggatgtgggggaaggggacaaaaggaaagagagagtaggggaggagcgagctccttctgttttctgggctggccatttgaggcccatgaaccaactgagctgatgtcagactctggcactcccacttccaggagtcacaacaaagtggcagggatcaggggcacccctgggtctcagagaagtagcacattgtaggagaaagagaatatgctgtgcagacacacccagatttgtgttttgctgctcctttcactccatgtgatttagacaaattacataacctctctgcaaataggaaaacttccttgtgcctgttggtcttggaaggactgggactacataatgcaccaatagaatgtctggagcacatcagatgtacaatatatgagcagtagctatttttattattaaacacaacaaccacttgggccaaaggccacctaatttgtagaatcattgagccagaaagaactgcaacaagtcagctcataaagtatgcatagaaagaagcctggaaggaagtttactaaatattaacaatgattatttctgagcagtggaattgtaaggatatttgtgttttcttctttatactctttcaaattttccaaattttctttagtaaatgtgtatttttttatactgaaaaactttaaaacattattttttttaaaagtcttccatctcagtttgtgggctccagtcagattgcactaagccatctaaaaccacagtcgtccaacctgttgctaaagccatgagaaaaggctggcaccaaccagtaaagaattccctccagtcttccgtaccatacatcctgaatggagcataatccctgcatggtttctagcccatcataaccttgctacactgtttcatagaaaaacttcagccattgagaatgatgtcattcatcatatttcctctttctttgccttttgctgccaggaagccttaaacaaatttaatactcaattacagtaataattaactcagattttgggcataattattttcccttcttcctctatggtttaattttccctttattattcaaccaacttattgcatatgtgactttcattgtaaactacctcaagtacactttaaaagttggacataaatcataaagtataaataaattaagttttatctgatctcttgtaaaaacccatgatcagcctgttaaaattcatattactaaacatcttgaccagtaaatgtcaggagggtggcatgaagagcaagaaagagaaagctctgagtcaaggtccatatttagtgggaaaaaaaatcctggcaaatatagatttgttcagaactaattatttacctttttttttttttttttgagacggagtctcgctctgtcgcccaggccggactgcggactgcagaattatttaccttttaaaatgggttacttaatacttattctagtatgtcctgtgagcatctgttgggtgtcaggcacagttttaaatgttatttcattaattttgtgaggtaggtattatcatttctagctgaagaataagaaaactaagaatcaaacaagttagataacttgctcccagtctctcagttagtaagtgataagtctgcagaagaaaccctggtccgtccaactccaaggaattcacaaccctattctgtttcatcaaatacaggttttctttctctaggtgggttatgttgaaatggtgaaccaggctgaagccacaggttgactgagttctaaatccagaagcacagctagaggctcctgtggaatgagagggactaaaattgcttcaagtgcagtggattactggggttagactcacttctaaaaatgaaacactgaagtggggctttctttttttctttgtttttgagacaggatctcactctgtcacccaggctggagtgcagtggcacaatcttggctcactgcaacttcctcctcctaggttcaggcaattctcccacatcagcctccccagcagctgggactacaggcgcgtgccaccacgccaggctaatttttgtattttttggtacagacagggtttcgccatgttggccaggctggtcttgaactcttgacctcaggtcatctgtaaggtggagcttactaggaaagaacgttgaaaaacagctgctgatgatatatctgagactatttcttataggaaactgtaggtctatggaggcaggagaaataatcacagcccagcaaccagaagctaggatgctttcactactaagggagagatcactaacaccatagctgggaaagatcttaaatcatcacttgattctgaaccagagacctctacaaaatctctaggatagaagaaaatgaggagaaagaagaaagaagaccttactctctaaattagtatccaagcaaaaatattcaacactaagaaaaccagtcaacaaaatcaacatttgttatctaatcttgtccaaaagaaattaaaataatggaacaatctgactaaaactttaaactaaatttgcctaaatactcaaagagaaataacatctactttaaaaaggatattgtgaaataaagcaggcagaaataagaattggcaaatatgaaaaagaatgaattaaaaagataaaatacacagataggataaattctagacatgaaatagatgaagataaaattagtgaataggaagatagtatttaagaagccaccaaaacgtagtgcaagtcagagttaagggcatgaagatatactgagaagctccaatttttatacatacatatgagatagtaaacctatctacctcaaggataaaaatgatagtattaaaagttgtggctgggcacagtggctcacacttgtaacctcagcactttgggaggcagaggcaggaggatctcttgagcccaggagttcaagactagcctgggcaatgtggcgagaccccatctctacaaaaaatttaaaaaaaaaatgccagtcataatggcatgcacctatagtcccagcttcttcgagggctgatatgggaggattgctggagcccagaaggtcaaggctacagtgagccatgattgtgctactacactccagcctgggcaacagagaaagaccctgtctcaaaaaaaaaaaaaaaaaaaaaaagagataaagaaagaaaaaaacaaagttaccagggagaaaagagagttatttataaaggaatgatagctgcattgataatagacatcttactaacaatagattccagcagacagtggagtagtatcttcaaatatctgaaaggggaaaaaaatcacttgtaaagccagagttttatacctagctaaactagctttcaagagccgatttaaaagaaagacagttttaggatttttttaaaatgaagtttatatcagtcttgagtcttcactgaaagaaccattaaaatatgtattatatcaagaaaaactcagtttcaaggcaggacatagaaatcaagaaactatagtggacacagaaataaataagttaaaatagacttacttcaactgactataaaataactaaatctagagtttaaaataaaagttaaataaaaaagtaatatgttgagataatatgttagtagaaagagtatttactgggtaaagtgtgctaagagtcttgccttgttcagggaggaggataagatattgaaaatttcagactttgaaacatatataattaaatgtgtatggtaaaactttaaggtaattatgaatagaaaagaacatcaatctataggttctaaaccaacaaaggagaaagcagaatatagaaaatctcaccaacctaagagaagacaggaaagacaaaaaaaaaatgaaagaagacaggaaagaagaaaaaaacctaagagaagataagaaagaaagaaaataaatagaaaactaaataaaatggaagaagtaagtcaaatatgatggtaactacaataaatgtaagctgattaaatgtgtctattaaaaattggagaatatcagattagaatttttaaagtattcagttataagctattttcaaaagacccacttaggccaaaccacacaaataaagagatgacaaaagacataccacaaaatgctaaccaaaagaaaggtgggtggtgtcacagtaaggcaaatggaatcttgggaaatatatgttaatagggatagagagatatataatgatataagaaaagataatattcatgaacctatatgcccctaaaaacataaccttgaaattcaaaacatgtaaagcaaaaactaagaaaatgtaaaaatgtaaaattgtgttaaatttaaatttatttttacagaaatttattaaaaacataaaagatataaccacaaactgatatatcctttactcaaaatccaacaataggccaggcatggtggctcacacttataatcctagcactttgggaggccgaggcaggagaatcacttgagttcaggagtttgagaccagcctagacgagataggaagaccctgtcactacgaaaaataatttagaaattagccagatgtggtgactattctggaggctgaggagggagaattgcttgagcctgggaggttgaagctgcagtaagacaaggtgacatgccactgccctccaacctgggtgacagagagagaccctatctcaaaaacaaataaaaaccaaagtccaacaatagagaatatatgttcttttttgaaaatatgttgaacatttacataaattgacataacaggccacacaaaggaaggtctcaacaaatttgtaagaattgttaacttatagagatattttctgaccacagtggaatctgatttttaaaactcaataaaagatgtgtttaaatctagaagcaaggagaacaatagattaagcctaaaaaaagcagagcaaaataaaactatcagaaattaatggaaaagaaacaacaacaaaagaatgaacaaatccagaagttgattattcaaaattactagtaaaatagataaaaccctagcagggctgctccagaaaaaaagaaaatgcaataaataatattaagaattataaagagaacataatttataatgatagatacaattggaatgaaaaaatcataaaaaatagaatgagcaaatctatgaacaacttaatactagtagaggaagttaatgatttttttagaaaagtaaattttgaaagttgaatcaagaataattaattagaaaatccaaatcaaccaataacccatgtaggaaatgacttgctaccacaaatcagagccttctacccaaaaaacattgggcataggtggatttctgggatgtttggccaacctatcaagaacagctaacccttatgttacacaaactgtttgagagtgtagaagaaaagggaaagtgactcatcttattaggcacttgataccaaacctaagaatacaagaacagactaatccattataaacatagatgaaatttttctaaataaaatattaacaatattaacagagatgacatgtcttaatatagatgcagaaaaaaattattttctagaattcaaagtccctttattacataaactcttagcaaagtaagaataggcaggaacttccttaacttgataaagaacatataaccaatacctttatagacaacacactcaatgataaaacttcagaagaaagatgatacctactatcacccttattactcaatatcattctggaagtcctaccagtgcaatgagaaaagaaagagaaatgaggtataagaattgaaaaaaaaacagacaaacctatctttctttaaagataatatgattatttacacagaaaatccattgaatccactgtataggaaaattattataaataataagagatttcattgagtttgctgaatacaacatccatatacaaaagtcaacagcattttctaggcactaggtaaaactaattggaagggagacagagactgagattgtagctggaggggaatgtatcaaagtaggatttttaaagatgggagattcctgagcactttgtttgctgttgagaataatccagtagagtgaaagaagttgattgtgcagaaaatagaggtggatgacttaggaataagtcctggagacatcaagagaggatgggatgcaaagcacaagtagaggtgtttgcctttaagagaaacagagctacttcttccattgtaatgagaaggaagacaattcctatgccagtagttgtacagatgtcacagtggagggatgagggagtttctgtctgattatttctgttttctcagtaagacataaactgagatcatcagttgagaggggatgatcattggaggtctgaggggagaagagataaatagtgacctcagaaaagttaaaataaactttactatggaaaaaaaaatgtagcctttctgagcaatgttgagtactcatttgaggactgcagtcatagatttaaagtgtaatcagtcaactcagtggaattactttctccattaatcttaaattgcttcaggactgtttcagcctaagccagtagctgggtttaaccaaatttgaagatttttctaggagagtttggcacgaggagagaggggcaaaggcgtgtaaggcagtgtttataacagtggcccatggaattgatcatgggtaaagagaaaacaaggacatgcgaggaggtgataaatagaacaaaacaaagcaaaacaaaacaaacaataaaaacagacaagcaagtgagcttaactgagtggtcaaaaaattattggagtagaaatactacagaaggttggctggaaggatgaaaatggtggtcggcgtataacaattgaaatctagacttgaaaggtggtgatgacaaggctaggctatggccattttaatgtagctgaagaaagtggaagaatagatcactggaagtgagaaggtcaggaactcagagaccaaggatgttaaagtcaccaagaacgatgacaaaaataggggtgaaaggaaggagttgtatgctcaagtgtttaataaatgaataataggttattgatgacagcaattcagtgggagaagggttatataatgtgaaggaatgagcatccaaatagctgtggtttttaaaggataaaggaggagaaagggtttggaagtagcagtggaaagcaaggaagcccatttccctatctacaggctctgggatatgggacagtgagataaaaaacaaccacacttttgggtgctatggggaaaaaccacatcctcagggccaatcaggttttggtgaaggcgcgaagatgaacagaatgttcaaagaagaagataaagatttagaggatttccagaaagctgagtggagtgggtggatattgggtcagatattaatagcagtaccaacataccttatcatctgtcctcccgctcccaccccccctagattgtaaattccacaagggtagagatctttgcctattttgttcattgatctgtcccaagaactaaaacagtgcctggaacattgtggatgctcaatacatatttgttgattgattgattaatagtagctaatatttattgagcactaatgtgccaagggtactagtaagtgctttatatatattattattgttattattattattattactctccccattttatagatgagaacattgaggcacagaaaggttaagtagcttgcctaagttcatgggactagcaagttgtagagccaaagttcaaacacactctagctctggtttggttctggagcctctgtattcttaaattccaaattacctcaccttttcatggttggtggatgtacagaacaatctcaaagtagaagcccaggtaatggtaaaagaccaaggaggctagacctctagtggagactgaggttaaaagttaaacaataaatatgaacactgatttcaaaagttagtctaaaagctagcctagggcatttgctgcctctaatgtcctatactcttgttcatctcctattgtgattgtgatcaaggcaccttctactgtcagttcccagatctttttatttcccacccccacccctcaccccccacatattgcccttcttcattatttttagtttctgcatattcccattccgacacctggcaaacctgccactcttttccactgacttctcttaagggcagtcaggtgcattgggacctaatttctaagcatgtgaatagtgacacgtcgagcttacagcaggccttaggatcaccaggctgactcactgtcatacagattccaactacaaaaatcatctgggagcgccctccgaagtgctaggattctgctggctgttttatgaacagctcatactatgaagtggaaaagtaaaggaacattccaacatttcaggaaaaccaaggaaaaaaatgagtatgtgtaactggatggaggaagcctgggatagtaccactatttctgtgtgaagcctctcctaactctcagtgagatacatgctcactagggtcaggcacatgaaaggtctctaggagcacttggaggtttggaccagagatcaggacccacagtgcactggtattgttgtgtgtgctgaggttctttgggtgcatgcaacagaaatgcttctggctaatgtaagccagagtttaaaagaaggatatagaggtcccacaggattgagggaaggctgaagaagcagtcttagaaatgggtaagaagcaggcaaattccagaaactaggaagcaggaaacacaaggctcacaagagtcccacaggtctggtcaggacactccacttggatgggatgaaactcctgacatctccattctttttgtccctctgttcaaaattcaccttccattgaagggagcatctgattggcccaacttgggtcaaaaacctcctaattgccagcaatatccacagactgtatcctactgggaaaagataatccgccaaaaggaaattagattgttattaggaaagggagatgagtgctaggtgctctggcagccaccattcccaacccctccctggatgtttaagaatatataaaacatttcaacttgagaaagcagattgaatttttttagaaaagaatatgtaaaactgtatttcttctccagctgtactttccgagccctacattggtctaaatggaaggatacctttcagtaccagcccagtcatgcttttgcatgattacctctatcaaactctatttctttggaaggaactcttaaatttactgtcacataaatgtttcctggtagctcaggttatcctttgtaaaattctgtctacctctacagcttgaagttaattttccttaagtcttcaaaaataaaagttcagtcttgttattgatttagatccttgtggaaattttttagtatttccttactcttttaaatagtctttttccccccttttgctgcttttcctattggttttctttcattaaaaattgagacccagccagtcgcagtggctcatgcctgtaatcccagcactttgggaggccgaggcgggcggatcccttgagcccaggagtttaggaccagcctggaaacagagatgctgtctctacaaaaaaaaattgaaaaaattagctgggtgtggtggtgagcatctatagttcctgctactcgggaggctgaggtgggaggatcacttgagcatgggaggtagaagctgcagtgagccatgcagtgagccatgactgcaccactgcactccagcctgggtgacagagtgaggtcctgtctcaaaaaaaaaaaaaaaaaaggcacccaaaatttttagaatgactgtcacaataatagcacatgtccctgaatagagatcctaccttaatgttggttaaagggggttgctcttaaaaaggaaccatggccagtcgcagtggctcacgcctgtaatcccagcattttgggaggccgaggcgggcggatcacgaggccaggagattgagaccatcctggctaacacggtgaaaccccgtctctactaaaaatacaaaaaaattagctggtcgtggtggcgggcgcctgtagtcccagctactcgggaggctgaggcaggagagtggcatgaacccaggaggtggagcttgcagtgagccgagatcgcgccactgtactccagcctgggcgacagagcaagatttcgtctcaaaaaaaaaaaaggagccatgaatcactgaaacagattttatttttgtttttgttttatttacctctgcaatatccttttaagatcagtgtgataggagacccatcctaagggattgttggaaaagaggaaaaacccttaatgaaaagtactatcattttagttcttctagatttagcccatatcttgagattaaaaagacaattaatgggatattttgagtgagaccttcacatatatgctccctttgataaaatttgtgtctatggcagtttttttttcttaatcgaccttttcatttctttatttattagtttaaaatatttccatgtgtaatctcattttagttttcaaacgaattggttagaagaggtattttgtccccattttaattatgtagaaactggttcacgaaaagatgatgatttacccaaggtcatgtagctaagtggtcaaaaaactaggctgagcatcaagatgtcttcatttctgggtgtttatttaagtcagcgatctcaaactggggccagtaacacacttaggtcttgctaggaggggaccctgacttggaacccacgcttcaaagagcctaactctggctctttccagtcccatgggccaaagagccaagacacctcacattctgggtcccaggttcccagagtcctgtcaaatgtcaccaagtccatttgagtctgtcctcctaagggcattctgcacctttgatgtgagcaacattaagccagagggacagccaaggggaggctgtttgaggaatcaggggatagacagagcttgactcccacaggtgtgcaggctggagctggggtgagaaggggagggccgggggccaggagccagctcttctctgctgccctgtatctgtgtgcaactccaagatgtcccaggactctgaattctcacacctggctgccaggtctttaggaaggcatattttttcattgtaggcaaacagaatatattttgtttaacagttagtgagcttgatttatacttttaaatatttagacatatgatatggggcctccatttgtactcttgctccaggccctgcaaatgttaggggtgggcttgcagaacgccaacatagtttgtttggctagcacaccgctttttttttttttcttttttaacatcttgaattagtttctaacactaacaattgggagattttgaataagaatagagatttctgatttctcttttttaaaattacagaaaatcatgggccttcctacttgtatggcgaaaaagagctggggctgagcaggatcagcctgccctgggtggggctgggccagtgtttcctgattggccacagttcccacctgtttcccttctctcatttcggtaacctctgatctctctggccactgagggcatttgagtttgtcacccttgatttacatccttctttagatatgtcctttctgtataaagccaccatgccatcacatttaacacattgtttttgcctcttttctacaacttccctcaaagaaagtttttttctccattagctaagtgtaaatccctacattttagtatggataaatgcctataattttgccatcttattccctaacttctgaatcttgggaaatcattaaaacaacagctaggaacttcaagagagcagttgctctccacagggatcccccctttctccatgccatgcgaactggaaacccagtgcaatggattttctcactttgaccccagtgagggagggagatttttgataactgacaaagagcttttgttcaggtttgcaacaggatggatcagccagccccacctcatggccccatgcttcttccaggttcatcttccccttctgccccagaaaagcccccagccacagcctccttgcctccaagtcgccagcactccgccccctcctccgcctgcctctcagtctggaaaacagctttgcacgttaacctccaggggcattcactgggtttccagaggggtccccagccccacaggctgccaaaataggctctttacactccatagatgggagagaaaaatctgcttgttcggttgcaactgtcaagcaaaggacatgctgagctcagatagaaatagcagcagggtcagggcagggcaaggccccagcatttcattagctcggcccagctaagggtgattgaatgcacacagtggcccatgaatggggccatggagggcagccacacagtgcagcacagaaaaatcattctttggccgctgtcagctggctcaatgggacttaattattgggataatgagaactgattttcattgttttaattttggggaaggggtgagaaaggagggacttttcttcctcatctgggtgaaaggatgctaaactgtggcctctaacggtcccgtatcctccaggctgctgttggctcctgtgtttgctgttctttatcagtgctgtaagagagtgttaggatggtcatctgtgtcagtgtctcctttagggcctataaacctggcaggatgtgtcctcagaagagcatttctgtgctggcatccacggtgagcagctgtaccaaagcaatagagggacagagagaagccactggacagagctgcccatgctcagccccttccaaatgcctccaggacatgagggaatcctaccctgctcctttttttttttttttttttttttttaaatacaggatctagagaattcaaatgatctgctcgaggcaaacataggatcgtctgagttccttgcaccctgttcaaggttcaagagcctaggactctactgcagaccacaccacaacactgttggatcatcagacctcttctagctacgaatccttgacaattgagataaggtccacttacatgaaccctgaaagtcattacatatgacttattcagccctcccttattcaatttgattcacttgccaccttcccaagatcttactcttcatgtggaaatgagagacttatttattgctcagcttgttccctcatttctctaggtaacatgtactactagtgggatcatcaaacaataagtatttgcaaaactgggcttagcgtggttctaggtgctgtgcaagtatataatgacaccccccaacccaaagaaagtcacctggggagacctgaaacaattagagaaacacacaaggggaccctaattgaatgtgaatctctctagccaaccaaaagaaagagagggtgggtttaagggtagtgagggacactttgtgaagaaatgacagcttgtgaggactccaaggttgagtagaatttcaacaaagagcaaagaatggaattggatggtgtgttcgagagaaggaaacagacattattggaataaagattccatgtagggaagaaggttgagttgaagagtagggccagatgatgtgaagtttggaaagagaggcagggcatgctttcttcacccacaactataatacatctttgaccataaaaagtggttgttattgctatcatttgtttttgttttcactttgccccttcaagttcttgaaaaagatagtcataaaagaagagggtatgccctcattcatggagcacagagaaggaagccctctgtgatgtttccagatgtgtaggtttaggctctagaccagtgctggtgccttcctgggactgcccaagccaatcaccagggagaggctgcagatcctttctctgctcagctccgttcgggctcctcttttcttgaagatttgacagatattggttaagttcttcaaatctgacaactgggttctttgtggcaaagaataggtggctaaggagaactggctctaacaggctaatagcctacctggcccctttccagcaggagaaatgccatagtccttcccagaagcacatcttatatgcacagtcctcacagagtgtgtctgtgcatcagaatcaattaatcatgcctgtcaggagggggaatggcccctctggctgaaacagtggaaggagccctcgtgattgaagaccactttgccttggaaactcatgcaggtcagaggggaaagttgagtctagatggcatgcggtattccttgggtatgttttctcatccctgaaatttgcccatgtcacccaactaactgcttgtagcaaagctgtattgtcagtgcaatcctttggggccttgtttgggcctgaagaagccattcatttcttaaagaagaaaaagctggcaaagtggaatttgtagtaacagctgttagtatttaaaacttttgtttcaagatcttcaggcacttaaaaatgactttaaatggccactctgcaagagtctatcttttacaaggcagcctgtgagatctttctcaaaacaagcctcatctcatctcctcttttattgagatccccattggtcctctattttgtatagaagtggttcccaaacttttttgatttaacaccccatcagtaaacaattttgaataggtactctcaatatacatatatttctttttatattatacacatgtattactttcctaatatattatgtacattataaaacatatacaaaagtaatttttttaaaggctgagataaagatgaagtaagcaatagtttaaaatgtcttgtcaattatgatggcttcatactgtcattagctaatatgtcaaaagcacaataaatatgtcaggggagttccatttatatcatttgaatgatataaatccttatatctagtagttttcatggaaatttctaactgttttggcttgacttcttgttacatgcaaatatttggtcattgtcttcactttgtaatatggccgaagaaaacttgttctaagggcagtgtcaatgctattattcttattatttgcttgtgcttatactactaatattatctttgatccattgtttccatgcaggaatattttaatccacttgtccattttgtgtgtgttagattaaatttgataatatccataatccaatgagtcaggaatgtgcaaattgtagtgattcatatgtcattgaaagccccaggggagtgaggactgaggacaccatttgccgcctctgcaatgtgcaggtcctaatcttgccacaagatatctcatgaacaattcatgacacataacaatggctgtgaggagcccgttgtcaatatttatatcaaatgttgtaagtccatgttttttatttcctagaaaaaaataagttcaaattctagtactttctgacttctaaattctaatggatcatcttgtgtatctctggggcatgcatcctatttcgagaccagatgtctacaggatggatttcaaacccattagccttgacttacagggtccttctctgtccaaactcagcccatctttccagcctcatctcccattgttccctgtcttataccaaggagacatcccattgctttttaaacatgaaatattctttaataactccattcttttgtgcttactcttccagccaactggaatgcctttctcccattctctaacccaagttaaatcttcgtaagatgtctgattcccttagagcagaggtcagcaacctttctgtaaaaggccagtcgtaaatatttcaagctttgcaagccatattgtctctgccaactactcaattttatcattgtagtgcaaaaacagccataggcaatatgtaaacaaataagcatggttgtgttctaaaaaaaatttctttacaaaaataggtagtgggctggatttggtccttgggctgtagtttgccaacccctgccttagagaacctgtcactcttctactactgccatcctagctttttctccatgattatctgtttacaagcacattttgccaaaatactaaattctttgaagtcaacacttttattcctattccctaaaagctagaaatctggaaatagaaatgattcaataaagacatattattgaatatcaagaattatcattatgttgctggtggaaaaaagtggagaaaaattcttcggttgggtacaagattaaatggcttacttctaagatttatctaaaataaaagattatataaaaatacaaattaatgagatggaaggatttgtcttgagttggaactaggtcttctaaaagggcagtcagtgtcctgctcatctgatcacccatgttcatattcctgccacattgttttggcccacagcttcgatgagacctagagaatcacttccttttcaaccatacagccaccgctggggccaaccactccctacgtttgtataatgctgtatggttttcaaagcaagtagcacaattcctatttggtagataaggcaattgaggcatattaaatgacttgccctatgaatgatataactgggacttctgattcctaatctaggactctttttgttacaccagacagcctctcaggaaattagaacaaaaaaatgacatattgcaaaattaagtcaaagaataaattaaccccatttgaaagtccaaggagaccttcagacaaatgtgtatcagaatttcaatggtatttggcagagttggcctaatggaagtgtggacaccctgccaactttgcataagatacataaatctcaaaatcaatttaactaactttcatttatcttggaaacacaaaaatttagactagaacttggcaggaataaagagatttacaccaagcctgcatccccactactcttgtaaactgtttcatgaaccccagtgttgaagacctcactgttttgtttgactctgaaggccgcctacgcatacttgctgctggaggaaggttaatactgactcagaagcaagaggaccactgactgaatcaccaccacttactacagtcctctgctctgtattccttggaaatctcttgcctcagcttgggcttaacccaacccacttagaaggagagaacaattttacagccccgcatggagtgactccaagccaatcgtatctgtttccaagtgatctgacgcagcaagcagattgtatttcctttggaggcttggctgagaattgttgggttggcaacactgaaccagagtgaataaaataagactgtcaagaaaaatctgaaatggcccctaaagagataggactaatgaaatgctcaggtcaggggtggggtgctttctgggcagactgaaaaaagaaaggaggaccaggtgaccatgtgtgaaattcaagagtcaacaatgatctaggtaagccaggcagattggcacatgcccagtacttttctgagagcaggcatcaagcctaaaaaaatgcacaaaatctacctcttatttttattcttacctttaatcagattttttattgaagttttttcatggttggttacctatccaccttcctcccatcctgccaaagaaggcagggactccaaatgcatttgccaaaaaccaacagacccctgtgttcaattattgtgggcttagggaatagtaattaaggagttccagggatgggatgtgggagcagcaaaggagttaggtttcacttaaggtccttgggaataaataaatattctgtcactaggatgaatggggttggttcttcacagatcatgtaaagggacaggcttagccctagaaccaactcatgatctagatgagtttctgttcagatggataagggcatatctttgagcaccaggttccatgggcacatatctggttcattattctttgctttgcttgtgcaaaattattttcaaaggcaaagacacggggacaaagttgggctctttgaggctgttccttgagcaaagaggtgtatgcctctggctgcccacttggcagtggatatcttcatgcttcttttttccacccaaatattatggccactggagtatttgtaggaaacagtctaaaaaaagacaacactcacttccccttgcttcaggctcttcacagtcaactccactggcatgtttcaggcacctgctgtgtgccaggcattttttttcagaatggaacaatattgcccttgtctttaatgccttaactgtctagcaggaaagacattattatgagtacctggggcagaaacagtgtgagaaacattttggagacccaaaggaaggggccattgtaaagaagttccaccagagtagaggtaagaacggggacagggcatgcctatagacacctatccatcattcgcttgtccacacattgatttccctaaatatttattatctgcttgttatctgccaagagtgaagggcttgggattcacagatgaataggacatggaatatagagtagggggttgggcagaagaagggagtggtgggagagggagttgaaaaatagattgggccgcattagtaagacttttgcttgccaatttgggtctgaactttgttctgtaggtaatgaggagcctctgaaggtctttctacaaggggtggcacagatacctgccccaccccattatttcctaccctgcaacttagaagtattttattcatgtatctgttttttagcttgcttcttgtttgatttccctaactgggatgtgagttccacgaggacagggaccctactgtatccaccactgtattcccagttctgggcacaaagtctggcacacagtgggtcaccagcaaatattttacttactgaataatcagatctgtgtttagacagttgtctccagttgataccatggagggacatccaaggttgggagatcctggaggaaggactggtagcagcagagaggtgctgagagcctaatccggggctatggtggcatagaagggaaggggagagatttagaggactcatcagagttaacatcatcagaccttggtgagggagagggagggtccagaggtttccatgtggatgtctgagtagctggtgatatcgttgactgagagagaggagacagggtaggaaccttcaggtgaagaggggcttgttatgggaagtaagggagcatagatagtgagatcagtcttggacatgtatgatttgagacaaccatagaatgttccactagagatgtccagtagacagttggaaatatacgtgggcaattctggaagatggctggagctgaggtcacaggcttttggtgataaacgaagccaacaaagagtaaagtcactcaaggagagcagacagagttgaaagaaaaaatagaagccccaaaactggaggaataccactggagggtgggaaagaggagctggggggaggagacaggtgtgctctgagaggcgggaggagaagagaagaggacttctggctactatgggatagcatgggccctacctaggacagggcagaggtcagtgggaatgggagctgttatcttgggcgaccaactccactcagttcttaccatgttaatgttaatggcaaactcttggcaattctgggcaagtgagaagagcagaaacacctctgtgcagtttatcaggactttctccttctagcacaccctgagggtgaggccagaattagtcatgtgctgaatggtctgcctatttcatgatgttctcagcttggaaacattttttttgtgcaactccaactcaagcaccagcaaatccagcctctcctcacctcctattacaaatggctgtcatggactagaccggtgcctaacaaacagcccacacttcgggatctgagttcaggttccggcacgattagtgcaggtggcttctggctctaaatctctcagaggagacatcttcttctgggggctgattcacacgtgagtgctgatcatgaccttgtgtcgggattaacctcctttctcagcatctcctgctacattccatctgtttctaaagacacctcattctgccttccttccggccatccactgttacctttcacttcctgtcggcacgtacaggccagggactttactcaagtcactgaacattttggggaaatgaaatgaaaacataaagagaaggccagtccacaaaacagctcaaaatggagatgctctggctgaaggaaggagtgttggggtccaggagccccgctcactcctcagcacccgggagcatcacggaatctaaggtgaacctccggggcaggagacacagcactggccttagagtccacaagcccgggttccttggccctgtctctttccctctctctgttgtctgtagctccctcctagctctgaaactccaagtacaagtgagcaggtcatgagtcaccaagcctcttttcctgggcgtttttccttccggggagagaacagccaggcttggacaaaaagtgttgggacaccctgaagcagaacacactccctgtcattcctggcctcactctcctccagaacgaaagcacccagacctgcaggccttttttaggaatgaagtcactggtctgtgtaggttgacagagtgtccttggaaaaggctgcttgggaaggaaactcacaaggcatgggtatccccactggaagaatccagagcaaaacccttctggaaatcccccaccccacatatacacaaggaaactccatggaaggcatcctgtcttggaggcctcagtgggttcctcctggagagtttaaggggagggaggcagaggaggaaggagagaaacctaaagtcagcaggatattctcatgttctctctctgttaattgcctcctctctttttctaagaaggctgagataccgaggcttcctcacccaccaccccttcctctacctccccttagtgctgggtgagttcatccatcaggacccctgcctgggactgtcctcactctcccgctgtggctcacttgcccccagggcccatcccagcccagcccagccctgcccagcccagcctgctgcatgcttctaccccggctcccactcaggctcgtgcgtcactgctattcatcttgtttagtgcttggcttggctgcagatgctgtaaatatggtaattttagactccctgattggaaaggattgcagagcgggttgtgggggaggacggcagtttgatttactccgcaggagctggttccgagatggctctccaccctctgtgcacgcctcttctccaagctgtgccccatcaggccctactcttagtgttgagtcctgacttcttggggtcttgggagaaatgagagggacagagtggatgtctgtgcgttctgggcctgaagaattgctggttagcacagagcatcacatgcaaggaggccggaagtgtagtcagtgatgcgcagggtgggcgtcctgacactgctaagacaatgcccaaggctgatgacccaggattatccccccacccagggcacactggggatgaagtgggggctgcccgaggcctctgaccccttctgagctctctcccttttctgttctcctttctttcctgacctccctccatggggggccatcagtccccagggccttctgccaggcactcacagggttgtcagcaaatccctcctcccacccctttgttgaataaagacctaatttgcatttgattacaggacccctgagtgggtaggggtgtattcagatccccagggagtgactgtgaggctggcatttcaggccctgggagtcagagtgggagctgagggttttgagccccaggagtaggtcaggttcttcaaaagccaccagatagtctcccagctgtctgtcttatctcctcaggacaaccctaactccaaggctggtgactgagtcagacttggaacatccccgtttttgagccacagtctatagtcacagaatgttccagggggagggatggggggagaaaaggagggcacaactcacatttctttgagccccaaacttcatttgaccagtgaggagtggcttgcaccaaatcattggtgcagctaaccacaagaatgttagctcttatctagtgcttcatccatgccctggacacattttttttttttttttttttttttgagacggagtttcgctctgtcgcccaggctggagtgcagtggcgcgatctcgactcactgcaagctccgcctcccgggttcacgccattctcctgcctcagcctcccgtgtagctgggactacaggcgcgcgccaccatgcccggctaatttttgtatttttagtagagacggggtttcaccgtgttagccaggatggtctcgatctcctgacctcgtgatccgcccgtctcggcctcccaaagtgctgggattacaggcgtgagccaccgcgcccggccgccctggacacatttttatagaaagatccagatgaagggaaaaagaagtctgataggtatttctttttactaagtcatgtgggaagctacagcggaatcctgccactctctgctgactgatggtgagcttatgtttggtgacaggaaacttgccatctacaaggcagcctcttaaaacttcggtcagctctgaccgttgtctaataattcttcattgctgcaagttttccagctgtcccccacatctgttttagtggtggtggaggattgggggactcagaaggagggcgtagattgtcctgctacagaaaaagaactagcaggactcctctgagggagcaacatggagagactttctcacccctctgcaggcaggctctgccccctttcactcactggagtgctcacttcctgtgcacacgctgcgccgtgctccctcctggcccatgaggtgccagtcaccacacacttggatttgtttacttttcctcctggaaatgtggacatgagggcattatactcacttttcaaagcaaaggattctttcctggaggggttaatagtccttaggtgtaagtacccctccagtggttgtatagcagttgtctgttgggggaccttaagtgattattcatggaatctttcatgctaaagatgcattgcagcgaaacgtcattggtttggaccaaatccggttatggtctgaagaacctcaggtatgggacatccccagcaaagcagtcttattactctttatcctgcagagtcacagcttacagaatcttccctagaagaggtgtgcctggtgtacttttaaaaatagatgcgcctcttgtgtaaacagcattttgcctgttggaatgtaaatgaatgttgttggagtgcttggagacagtttgttcttttagtggattagcaatttcccctgcaaatgttgtttcatggtatttgctaagcacatccttccttcatatgcaatatggaattccctatcagccagcctagatgggcgaaaactctggaagttctgctgtacccagtccatcaataaccctagcagtgatctgtgttctagaaaggcaggggtgggggatgagtccaggttttctaaagacattgggaaataatagcaaattttccagagaaggagttgcttccaaaaatttaaaaaatagttaaagagaggcatttataaccatgaagagtagtcaacagagaaaacaaacatgccagtgaatgaacatcctagcagagggtggagagagcaagccagaatagtgtggagggggtacaaaagtttcaaattatcttccctatataaaattcccatgatcccccaggcagtcagttttaactgcttaccccagcactcccaaattccattcttccggaggcctggcaaagcacctcctcagcactcactacccagtcccaggcctcaggcgtgctctccccacacggctgctgtccccatcttcacttccacatcatccttggatcctagatcactgtccctacagctcacttccttgtttccactccctgtccacacattaaatatccatgctctggcctggcagtcagcagtcccatgacctggctccagggccccttcagccccaagtcgcgtccctcgcaggtttgatgcccaagcagcagatttctccccaacagaggcctcagagagtgcctggctgtgataagcatgtgttgctgtgattttgtcatctgtctccttgcttttgcttaggctgttcccctgccttcctctctgcctggcaggattccccccttcccaagaagtgcctgcttctgatctccagtaagtatctgacgtcagtcatattcttaaatctgaccagctcacagtatttacatccaggatttctctctttttctagaatgaaaacacctccaggtcaagggctttctctcacacttatttacacctcagcacctagcacagagtgctgtacacagtagatgcttattttagactgtgatatccttaataataataataatagctctgcattattaatcattttccatgtgcaggcactggggtctctccccagatgcatcttcagcacaaaccaaagagtgttaccatcagttacattttatggaacttgccaagagcgtaggtaataaatgacagagctgcgatttgaacccttatttgtcccctctaggacttgcatttgaagtcataagggtgctgttctattactctcatgaagacagggaccacgtctttacctaaggcagtgttgcaagtggagactaaagaccaaatctgccccatagatatgttttgtttggcccattctgtgcgtgtttgtttgtttctttaatcaggaaattttacatccacatctagatttctggctttgctgggaagcccaggagatacagtaaccctggatttaagcgtagtgatgctggccagtgctcgaaaccgctgtccccacttcactacagcctctgcttgcctggcctgagggtaggggagcattagagtttgcgtcttccgcactgtactgtctggttccatgtttcacctcccaggcattgggattggggtgggtccgttcttggttatataggactgccccatatattgcagggtgtgtagcaacactggccctcacccgctaaatcaacagcacctttccttcagtcatgttgacaatcaaaaactcccccaaacatttgcaaagcccctagtgagggatgctgccccattcccttttgagacacaatggcagataaccccttgtctcaccagtggtggcacacagtagggcctccattaaatagatttaaaagacctaaaatgcaacatccattaccaaatagttcccatgttaaaagttcccatgaaaggagaagcagaaaaatgcaataatcatagtatttttttaaaaataaattatctggagcaaatttagtgcattcccttaaacacctgtcccatgatggaaaaaaaaagttagtaataacacgtttctgtggaggcatttccattctccacgcctcagttcccactgtaatgttaattggttatggttttctttgcttctagtccttacatgtgcagctgtcaaccaggcaccaccccaggaaatgctgcacttaaagggataagtaagaggaactgaatcacatgcagcttttctaaggagaaatgatattgttaatatttttgcttgttgttctaattataaaaatactatgtgcttatagtagaaatttcagagtaaagtactaagaataagtaaaaatccctcatactctcatcatcagaagataatcactgtttctatttttgtatatttccttccagtctttcttcctctatcgcacatatttgtgtttgttgttgctgatttcattttgcttctaagaaaattgggattgtactattgataaagccctccttgccactgcatggctgtaccatgatcagtttaaccagtccccttttgttgaacatatggtagcttcccagtttatgctgtgatcaacaggacagcaatcaccttctttatccataaatcttttgggatcacttggattatttctatagaaagagtaatatggtaagcagtgtagaaagaaaccatcctctccacaagagagatgttattggctctggccctagaagagatgggcagagccaagggtagactgagttctggttaaggaatttccaggcaggaagaagttcatatttttgagctggcttctctagtgcagctgaagacgagccatctactgcgagcaaagagaggcgaggtggggctggggacttggggagggtggagttggtttggagctcccagtgcaggaagcaaacaagggcttaaccaaaggatgaaaattgtttggcagcattgagcacctaggtcacactgtgtgatttaggaatagaggccattagcacagatgtgcagctctctccagtgaggcagagacaaaagcagaggtggggtggaggtgggtggggggagggtggggatagtaggatcatctcaggtttgggaaatggcctgacagatccagccaaaggtcagaggggctggtgagagcctcatgaaatcttttcccacccaaaataataagattgctataacacataagtaaaaatcgtctctgcaacctagcaaacagagctaagaaatgagctttgtctactaaaatggctttacagacccaacatgagctggacatagaccctgagttacttttagggtataataataacaacaatgaaaactttctacagcagatcacagttacagagtgctttatacaatacataagtccaatctcatagggtattactaagtgggtcccccattttcaaaggagaaaactgaggcttagaaagggtgatgatatgtgtaagtgtaaataggtagttgactgtagagtcaggctccagaccagctccaaggacagatttgtgataattaatctattaatgtgaccatctcttctgtccttgcaagatgacttttgttggaaaacaaaagtctcaaaacaaaagtcacacctgtgaccttgacctcctaagcaagacaattaaccaaacgagctaacaggaaaagccagttcttcctgggtgtaaagagtggtctcagtgtcctacctaccaggctggtctccttgctgttctctgaacagacctcacacagtcctcctgccggaggtttcccttggtgagtggtttctacacctggactcctctcccccacatgccgacacagctgattctctaacctcttcaagtctttgcttcaatgtcaccttcccagtggtgccttccctggctcctctaccttaatggcaacccccgccccactgcaaactccctccaccagcacttcttgtcttcctttcctgctctttattttcttccatagcatttatcaccttctaatatactagtatttcattcattttcttgtttctttttgttttctctaccataatgtcagtgtgacagtgcagaatttttgtctgttttgttccctgctgtttccccatgcctagaagatgtccagaatatggtaggtacttaaaaagtaattgttgaatgaatagcagccgaggtattaggaaaaattaaaaagttttttttttttttttgagactctcactctgttgcccaggctggagtgcagtggcataatctcagctcactgcaacctccacctccagggttcaagtgagtctcctgcctcagctccctgagtagctagaactataggcacctgccaccacacccgactatttttatatttttagtagagacaaagtttcactatgttggccaggctagtctccaactcctgacctcgtgatccgcccgcctcagcctcccaaagtgctgggattacaggcatgagctaccgtgcccggccaaaaaaatattcttaagaagaacactagcacagtgactcactcataataggacatccgtatgtgctggttccttctctcttaccccttgttctgtgttaaatgttatgtgctcagcacatccatctttggaattaaagtatttctgggaaagataacacattaagccttaacatccagtccatgaagctgatatcacaggggaagaaacccacactggctcttaaggaagtgggtgagtcgtacatgaaacgcgccagagtgtccctgtctgtctaacggggtgggacacatgatcttggagggtatttccagtgctgcctatgattccacccagctatgaatcagggtgggcagaaactggaaacaggcatgtgggacccaggtggatcacagtctcccctcttccacctgctggcattcctgcctttggggacagcagggcgggtgaatcctgggctgtttgctcactgacagccatggggttgcaaaggatcccttctcttcagccggggcactgctgagttacttactcacccatcccaacattcatttattcagtagaaacatattagatgtccccagtgtgctcagtgctgagctgaataaaacagacaagaccctgattgacagctgggtgaaatcatagacagcactggaaataccctccgcatcccacccctcaccattagacacacagggagaccctggcttgtcctgtgtacaactcactcacttccttgagagccagtatgggttttttccctgtgatacctgcttcatggactggatgttaaggctcaatatgtgctatcttttctgaaaagaattctaaaggtggatgtgctgagcacaaaacatttgacatagaagggaagagaagaagggaatcggcacagtgagttcctattatgagccaagtcactgtactagtgttcttcttaagaatactttttatttcttctaatacctcagctgctattcactcaatggttacttttttaagtacctactatattctggacatcttctaggcatggggaaacagcagggaacaacacatggccccacagtcaggcaacggggacagacctcaaacgtgaaaacccacccagaccagagccatccttgggcaccctgatgcctgttggactttcctatcctactttgggactcttccttcccagggccttgctcaggcccctacctggaaccaacagcctccagctgctctccttgtctgaagcgtcctcagcatgcccttcctccctgcagatcgctcccagatggctcctaaagccatcaggtggagttcagcccaggctacccagaggacaagtgaggggacccctgggggatggggagagagcggcctgagaagaggaggtggctagaaagaggaagggaggaagaacaagactgaggagtcttttaagagcgtgaaacctgaggagcaaatgtcccagaaggtttgaggaaaggttcactgggaaatgcactgcaggaaacccctgcatggcctctcaggaaaccctaccatggagatcacattaggcctgaaaatatttgcagttacatatgtttctttgaatgcaagaccaagtggaggccatcttccagggagggctggtcacaccaactgcaagcacaattttaatctgtcatccacaaagcatcctagaggatggcgcctgcatacccttcctgccttgtttcctaccaccccaccccaccttctccacacaccctgagtttctcagtgttccctgaataagcttcctcacacctcattccatggcatcctcaggagtccccggcattggggcactgccatttctccttcctgtgttccccagccctacctagccttcaagcctcagctcagagccttcacctcttccaagaagctttggctggccacctggaagcatcttcggctcctttctacactttcaggagaacactttttataaactcccttgtatggggtcattattttatgtacatgggttagctgttgcaccaactacagatgaatctccactcataataagtttaagttccaataaacccatcgaaagttgaaaatattgtgagttgaaaatgcatttaattcacccaacttaccaaacctctgtagcttagcctcgcctaccgtacacatgctcagagcacttacattaacctacaatgggcaaaatcatctaacacaaagcctactttataataaagtagggaatatctcatgtttattgaatactgtacattgtgttaaaattggaagtttcacaccatcataaagtcaaggaatcatttagttgaatcattataagtctaggactgtctgtagatgtaaatttgttaagaattaggactcaagagtagaattcctttaatccacatagacttacaatggtgctgtgcacatggagcccctaaatcattgctgactgagtagatttcccagggtaagcccaagaagttactcctagaaggggctggtaggggaaagagccaacatcccacatgcctgcccactttgggtctggtcccaagaaacaaactccagtggcctcgaaaatttaatattgctgtcagaagggcctccccttcaaaggaacaggtcctgatagctcttgttatatgcaaagtggaaaggtaacgtgactgttctctgcatttcctgcctttcaattgagtgaagacagacagatgatttattgggcatttcctagcctccccttcaccataggaaaccagactgaaaaaaaggtgcaaattttaaaaagatgtgtgagtatcttgagggggctgggggagaattcctgtgtaccactaaagcaaaaaaagaaaactctctaacagcaggacctctgatctggaggcatattgaccataaatttacgccaccccatgagagctcaaaggctgtgctgttctcgtcctctctcagtccccatttccaggtgatcaagcttgggcttagggtagtggcagtgtggctttagctgtcagccatcaccatggaagagcaggaggtttaggggccttcataacctttcaagtgttggtttccgttggaagtagttgaatatctccaccccacccatgcccctgagagaaagccgggaagaggggccaccatcgggggctcagcacctgcaagcccaatgctgacatgaaggcttcgcttcattccattcggccacgagagctatactcgcttcctagggctcccctagccacgcgggtactttactgagtgtctgaaaacaacagaaattgattgcatcgttgttctggaggctagaggtgtgatatcaaggtttcggcagggccatgttcctcctaaaggctgtggggaagggtccttccttgcctcttctcagcttctggtggtggccggcactcctccacattccttggcttgtagctgccccactcccgtcactgctgtcatcttcacgtggcccttccctatgcatctgtgtcttcacatggtggtctccttgtggatgacagtgtctgtctctgttcctctcccctcttcttataaggacaccagccgtattggattgagggcccaccctactccagaataatctcatctccacctacatcataattacatctgcaaatatatttttatttcaaaaataaggtcatattcacaggtaccagggttaggacttcagtgtatcttttgagggtgacacaattcagtccaccatgggagacacatgctttttgtccatggccttatagggaatccttgggtgactccgtatctgtgtgtaagtatatgcctgtgatttgtattcatatagtgtcatatacacacaaatacctatatatttacatgtatatatatataaatatgtatatgacatttactaatacatatctctaataggtatttgtaatatatataaaaatacctgtgatttgtattgatatagtgttatatatatgtgtgcatatatatatatacacacaaaaaaacctgtccatatatatgtgtctatagagacaaatacctataaaatagtaggtaattacctatctatacttataatagatatttttaataaatatacaaatatctgtacaaacacctgtaatttgtactcatgtagtgtcatacatgtaatataaatacatctaaatataatctgtcatacatatgacacgatatgaatttgtaagtcattaacctgtgattaatacacatcccaggggcattttttttttttttgagatggagtcttgctctgtcacctaggctggagtgcagtggcgtgatcttggctcactgcaacctctgcctcccaggttcaagtgaccctcctgcctcagcctcccaagcagctggaattacaggtgccctccaccacacccggctaatttttgcctttttggtagagaagagtgtcaccatgttggccaggctggtctcgaactcctgacctcatgtgatccacctgcctcagcctcccaaaatactgggttacatgcgtgggtcactgcgcccccaggagcaattctgagtaatgccctgatttcattaatcaaaggaagactgcagaggtgtttgtagtcctttttctgcaattttcccactaaagcaatggcaggaaaggtctgtcgtcttgaccacagacacacacgcttgccaggactgcaccccgaggaggactccagcatgtggaatgggcagaaggcagaagccctatgtctgccctggggtccccagtgctgaaggcagcagctctgctggctgcgcggctcttccctaccttgttttggatgagaagacccagacccagagtcctgaagtggcttgtccaagtccacatggacacaaacagttctagaagtcacactgccacatacccagcagagctacttctcttctctgcctcctccttgccccattttcccaactaataatcagatttttcctcggagtgacttctgacgagcatactcagatgttacaggtagtcacaaaaatagcacccttttcccatcaaatgggctgagaaacgatttttcacggaggtcttgccacattcaaaggttaaagtactttgtgttctgttgttttggagctgttggagaggcggaaaaaaaattctttttcaatttcataaaggatttttgttttcattttctcagactccagactgactcaccaaaaggttcatctcatattcggcatacagtggcccacctgggaggtcttttattaatgagtctggggacttgggggctgctgctcccctaaatctacttgaaagtgaccttcagagctgggcgcggtggctcacgcctgtaatcccagcactttgggaggctgaggtgggcggatcacctgaggtcaggagttcgagactagcctggccaacatggtgaaaccccatctctactaaaaatacaaaaattagccgggcatggtggtgagcgcctgtaatcccagctactcgggagagtgaggcaggagaatcagttgaacccgggaggcggaggttgcagtgagccgagattgcgccactgcactccaggctgggtgacaaaagtgagactccatctcaaaaacaaaaagtgaccttcagaagcactgacctggcctccccccgccccacacacacttctgccccaggatgtccccctctctccatctccaccctgctctctccacactacaaggctacttgacttcgcttctggaagccctagggcctgattctctctccctcatgctcactgggatcatccggcagggaacagaagggatactgcttccgggcagaaaatgggccagattcaggaacgcctgaaatggggctctggaagccttttgcttggaactttcttggagcatgtttttgccagggccatcacccatctaggagttccaaatggtttggcagaaatattgccctgcctcctacaccttcctctgccactcctgacttcctttcaccccagcctccccagctgagaactcccatgctggctcccaaatacacaacaagctcttcgcatggtgcccgcttccacaacgtctggtgatcaacgtatcctaattcattggaaagcctaaattgtggacctcaaatttaaggatcatttagggggcttattaaaaatatcggtttctaaccccaccactcaaagtcttattgaggtctgtggcagagcctgggaatctgcattcttagcgcaccccaggggattctgaggttgggcatctagagggcccccttggagaaatacagcttaattctacagcaggcatgctcacctggggcctctgctctgcagagcaccgctggggacacttaggcgaggtgactaggaagaagaaaagaatagcagtgtgaggattcaggctgaggtataaatataaaccaggtaggtcaaggcctgggcctgggaggagggcagaggaaggcaagttccccgtgtggcttctcagggaccagcagcgtgagggttccacgtggcaacgctgctggagagatgtttacatctgggcactggcagagccttctggacaggccatcaagccagagggagcaggccctcgagctaaatggcatcattctgagacgggagctccttcagctttgtcctcaaaggcactgcagcttggtgaatgaacataccggctttagagtcacactggtggcccgacttgtctggtctctgtagtttcctctgctggaaaaggaggacaacagtcttccatgcagagggcgagtgggaggatgaaatgaggtcatgtgtgcaaagttctcagcatggtccttgtggcagcaatgtacacgagctattgtctttgtcctcagagctgctcctgtctgcctcacagcacgtctctgaagctgtctttgcagaattagaccacatgaataatttggagagtccataactgtcctagaaagcttttggtttgtcctttttctccctgtgaaagccctcgtcaccctggaaatgccagttctgaagaggcaacgcttacaacgcatcaaattttctctccaagtgaccctgcctcaccagacatttgcagcccttccagtgatactgaaagaaccactcaacaggtgggggccagatctttgcaacggaaaatgccacttttgaacgccaaacctctgcctgacgaaggctgtgtgatctacagggtgagacagggagtttaaggtgggaaccaaaggctcttgagcaaatgcagaaaggaaatggacttatgcagaggcccatacagcccccagtcaaccctgcctttgccatgtcagctgtgggggattttgtgctggtctcagcctctgagcgctctctgcctcagtttccctctgcagggtggagccagcacccacagccatgttttggcacgtggcaaactaactccttttgtgtactgtgcagtcttaggagtaatgaggcagcaatattattgttagttctctgttctaatgatcagctgtgaggacctaagcaaatgagagttgctatagtgttatgaagaaaagaccctgacttgttagagtggccatttgtttccccacagctattcatccccctggtgccctcatcaccagggcatatctaaaagatgccatgctagatacccatccagggtatggtacagacatcacaaggtaagtattccaaggccagagaagtgaaaatgttcacagcagctctggaagagaggaactcagaaacctctgggcaccttctggatggagcccattgcctccacatccaaacatggaccatgtattgctacaaaggaagcaatagtgtgctccacggaaggcccgggctgctgccggtccctccagagttcacggctgggcatgatgagaccaacctctctcaccctggccgcttctctagccagtgggagggcagaggctggcagaaaagcctccgtctgccttgttgactctgccgggttcagagagggcttcacatttgacttggcgaaggagagaagttctttatttccctcagcctcaggtctgccaagcccaaggctgaggtgagcagttttctcctccgtctctcattgccacatcattacctgcagagttcaatgaaaagccccatccagaatgggccaagccgagcctgcaatgggcttgttctctcctcggggcgtgctccttcttcccctccagctcagcctgccaggccttcccagtgatactgcgagctgggtttttctttcttcccgccccccaagtccagagcccagttatttacccaaagaaaacagggaagtgacaaggtaacagagtacacatgttgtgaaaatatgcaggctggggctgaagaaaagaaaacattcttccataagtagctgccttgttaattcatttttttctccagattagaaccagccatttcttgtgtgccttcaagcaccttctgtggtttcctgacagctgcctgcaaggggtgagatttggcttgaaaaatgggccatcggtcatgcttcgggggaagggcagaaaccaaaattcccagattgctcaaattcactgctccttttctaaatgggaacgaaagagggagaggtggtggggagaggactgtataaactctgaggcgtaacctgattttccgtaagaaacgacagctcggtaatgagcagtccttggaacgtgcttttttacctcctcttgaagttggtttccgatccctggcaagcctgtgctctgcagccttgagtaacggccacaggccgattctcggcaattaaaaataatattggccctgatagagaactcttgggtgctcccccacacatacacacccttttcattatgtgccaaagatcactttcccaaacctgtttcggaacagctggccgcactagagggcctgcatgggctgggggaggctggggttattaatagcatttgctctgcccggtgtttggggcaggaaaggggtgatttgcgtctttttggaaggctaggccctcatcagtttgggcctgatttttctgcgctggatcctttaaacctcagggcctaccaagaatggttgagaaagcctgaagagaggctctctgcggccaatatcccttcggtacaaatcttcgtgcttctcattatttccctcgtcaacagtctccgtctcctttgcagcctgtgggtattggcctgcagcttggctggtctccttttgggagaggtcatgccgcacaggcctagccggcccctgttagcattgctgtggtgctttctgttaacgagaggccactgaagctgggcgatgcctcccagcaggggacgggcttgtgagaaggagctgcttgttgttgcccttccccagagaggaagccgagtgcaggcctgagcgggcagctggggttggagaagcttcacgatcccttacttatggccacagagttcatcagcttcccacgaccagcacccatagccttaaccccggggtgggtggaaactctgctatctcctcacagggctccccaccaccacaagggcaccttcccaagagcccaggagagggctggctttcaggcctggtgtggtgttgataatcaggtcgggttgagctgaaatggaaaaccttgagagtgaggtggatggtgggctccaggctggcatctcccactgaaagagccgggtcgcagagacacactcaacaagtgccagtggcctggctggctgaggggacctcagagcaccagtgtttgggaccggggctgggaaggccctgccatccaccctagtgacatccgtcatgtggccaccaggttcccactgggtgaacacagcctctcccctcactgagccagattccagcctccggccataggtgaaagacaatttccgattattgttttcaaacattctacatccagcgcataaaaacacaatagtgacaggaaaaatacacacacacacatacacacacacacaccccacatgcacacaacacaaaggtttaagcgctcactataagaaggtcaggggacccttttctcattccagtccttgatgtggatccaagggaagcagtgcctttgaagtcagcagcaaccgcagcaggctcagctgtgagggtgtggacagggaggcagacaggatgtgctgccttatcagggcccaatctaaggccctcctgtaaggaccaagcttcctccagcaaaaggtgacttagaggtgtttgttcaataatgcgaggagactcattacaaccctggggcacttgggatctggctctctcagagccaagcctttctgtttggagttttgcacagccctttaagaggagacttcagagtgagactctgtctcaaaaaaaaaagaagttctttcttacattgaggtggaatctgccactccatgactttgattcattgacccagttttgcaataattctcaagagctgggaagaagtatagccagatttcaataccagggagagcaggcagagaaagagagctaatctcctttaccccatccttgctgctgtctctgtctcatggttgattattaatatattgattacattttgaacagactgacacttgctttcaccctaatgtattttcatgaaatacttaacatcttcatgtcaatattatcttataaaacactgctgaaaaggtgcatgttggagaatggtgtctcactccatccagttctcccagtgcaactggggagggtatctggatcttttccctggaggtgtctggccactctcatccccgccgggctccaatgtggccacaagccactcttgctgaaggaagtgtgtctgcttttataccttgggtatgttggggtagaaagctttaggaccattcttctagaataaggtaaacttgctccctcttcttggtgccaagccacctcacttcgctgggccttgtcactcttcaccctctctcctgatttctccaggttaagcagctccaggactcatctttctctgtacctgctgagaaactaactttacatagctttttactagaatgtttgctctgtgaggtcggggagtgtgtctgttttctttactgctctgtcctcagagtctacaagtatttgctgaatgactgctgactggtttcccaggtgtagctgacaaaaccctatcttcagctcttacactctgtgaggaaactctggagaattaataagaaggtgaacctggtctatttcccatagaattgtctgattcatcccctttgttagtaattagaagaacaacgtcaaggccaaatttcaaacagcaagtcagcagcaaatccaggcaaacccctcaaacttgagcactgcttgtcttgtatgccctgttatgccagcttcattcaaatggtgaccttgatccaactgaggaagctcatactcaggaagcactataggatctcattaccactgccagattgaccactgtcttctacagctctgttcatggacagtccagggctcacagcatacacctaccaagctgggagaaacccccccggtgcctcagtgactgggggcatgcttggattgcttttctctctgaagtctcatcaaatcccactttcatgatgtcacttctcagccctagaagctacaagacttccttgtgttctccaacaccaaatcccaatttctctgcttggctttcaagattcttcattatctggccccaacttgcctatcaaaccttctttcttattactcttcaatgcattctctcttctaccagcaatggccaggccatgggtttattgctttccctgtgtattttgcttacttctttttcaatatgcttgttttgttaatatcccaaataggctcataccttcttttttaaaaattcaactttactggccggcacggtggctcacgcctataatcccagcactttggaaggccgaggcgggtggatcacgaggtcaggagttccagaccagcctggctgagatgatgaaaccctgtctctactaaaaatacaaaaaattagctgggcgcagtggcaggcgcctgtaatcctagctactcgggaggctgaggcaggagaatcgcttgaacttggacagcagaggttgcagtgagccaagatcgcggccactgcactccagcctgggtgacagagtaagactctgtctcagaaagaaaaaaaaaaattcaactttattttttagagtggttttaggttcatagcaaaatacagcagaaagcacagagagttctcatatacccctgtcccccaacatgtacagccttttcctctctcaacatcccacaccagagtggtacatttgttacaactgatgaacctacactgacatcattgtcatccaaagtccatggtttacattagggttcacacttggtattgtatattctatgggtttgttaccacatgtttatatggtaacaccatgtatccaccactacagtatcatacagagtagtttttcactgccctaaaaatcctctgtgctctgtgtatacctactttttatcatctgttttctaccccagtcatcacggacaatgcaagttctaccttcctcacgaagtctttcccagtgactgtaatctgcatagatctccctcttcccaggatccttgctgtacccacaagaagaacacccttggctgtgccattattgtctcctcctttcatattagccccatctctgtaagtagattttaagctcctggtacttggattctaccatagtgcctggcctgtggcaggagttccatatgcagggctgacatattgcatagttccaggggtcccgttcacatgatatgaatggggcccctggagttacacaagttatagccctgtccataagtccttggtgattgaataaaactcattccaggacctgaaaaagaaacaattattgtgatcatggttcagttcaaatcttcaggtgattattgaacagctactatgtactaaccaccaatgatacaaaaaatgaataaaatggctgttcctaccctctgagaaactatagtcttgcgacacagaaaggtaagcaaacagatcaccataatacaatgtgaaaagtgctaagatagaaacatgggtaaaggagatggcacttgatgtgtagcctgaaggattcataggaatttgccaggtaggtgagtgggtggagaatattccagcaaaaagggacatcattggcaaagtgaaaatacatggtacatttcagagagctgcaagtggtacagcttattttctgatgataaaaccagaagcccagtggttaaattgcctgtggtccccaagcaaacctgtaccagaccattggcatgataggattgtgtgtatcacctgcacttactgcttctggaatcaaaaagaaagaatagagccctatctttcctggccatcccttgctcttccaagggctgggtggagttaagacacagaacttccttgtatttttttcatatacactaccctgtgttgctctgtgcacaatagggtgtaccattcaagcagtggaattggatccctctagaaccctcactgggcaacctcaggaacgggcagccattttcaacaagctttccttcaaagcttgcactgtttttggcctacctcataagttcttcttcttcctcgtcctccctttcttcttcctctgccctctctttgccttctttctcatcttttttgatattttggatgcaagaagtctggttaattgataaaacccagtgtgggcaaaaatagagttgtttcttccccctgcatggcttcctctccccaacccagttgctaagtggtcattggccaccatattggaatttagatgtggctgggcttccacaatgcatggtccaatctcagagtgtgttgaagggctttggggtctggttggataaaacagctgaggcccaatgttgtggttcttggcacctctcatttcccctttctgtatttcccttcggcatcatcagcaggattttgtttaaggcttctggagcttgtctttgtttcacccgggaaagtccctgcagggagagctaagatctccccggaggaatgggccagagccctgacctctgtcacccaaattgtttaggagaagcagcccccataggggttaggagggtgatcaattggcaacttaaggagtaaaggcctctctctccctcttctccctctgcttattgtgctcagaagggcaacagggtcagcagcagcaaactgaggggccaactcaccacgccttgaaagaggctcgttttgtgtttcagtaatgagcgctctttctccccttggatgcactcaaatttcacaagttacagggaacctgtcaactgctgttttcattgtatggggctcacagggaacttggatatagggcaagcttgtttcaaagaaagcaggggaaagaaaagtcctgaatagctgcaatgtgctgtcatatgcagatcacagccccagttgctatgggacacctctgcccgcagagagggcaagatgccgaacgtcccttattgatgtgattgcctccttggagatgggaatgcccctctaaaagggccaggctaggagccgacagcaccacgggctctcgggtttgccatggaaccgggcctgaagcagcctgcatcccagcagcctctgccttcccactggctgttcagtagggagccccccaacccaggggctgagggaacaggccaagctaaccctggaaaagtgaggagaggcaggtgggaagggtccctttttgcggggcacaagcctttgctcatagaagggctactggagggcatggttgtgaaccaggcctgatgttaaagacaggtttcaccttctttgtttgtcttgccctctgagaacacttggcaataacattcctttcctgacaggctcattttgtagctgacggacattgttttctttcccctgtttacctaatgtggcccagagtaacagaacaggctgtgccagcgagagaggagagtgagcctccccagtggctcctgggtccccatacccaggtccctctgccctgagctccttgtcttgcatctgtttgccccacctgtgggaacagggactacccagagggctgtcctgcctggaatcaagcactggcaggacctgggtcaggggagcctgcgattaggagagggcccagaattatgactctctccccggggtcatttgactgcaaggttagaaggcctgagatcaaacaaggctatgagaaaccagccttgtcactttgcataggatagaccagtgggagccaagattggaggcatctgaaggtcactgtaggaccttaaaaataccaggggagggtactgtgagaaacagattcccatcaactgtttactaaacactctatgctatttaaagggacaaaggcatggccaggtcctatcatcagggagtctaaatctggggtctgcagctgagccaggaggggggtccagtgcccttggcagcctgctgtaaccttctgaccctctgtgtccagcccccatccccatttttacctccagccaagcttccccctatgggggttaacagggtaaatactgtccaggcccttccctcaaagaagctgcaaatctagtaagagaataatatgtgcgtatatgaaactataatttaagacactgtgatcaataacctaaagggaaaggctctgaggacatccaggggtcttgggctcaaaggctggagcgccacacacacacacacacacacacatgcacacacacacacatgcacacacacacacatcaaatcacatattagctcgtgtcttcatgagctttccagtttgcaaaccgctcacacatacagcatttcctttaaacttcacatcagccagtgaaggggctttgtaagcctgacatgtaagatctaacaaccctcccagaatgatagaattggcagaggggggaggcagagactgtcaagcaatggcaagttttctgattggctggaacacagggcaggtgaccccgtgagctaaggtgaaacaaccaggctgaaggccttgcatgctgcagtgctgggtacaaccatgtcagttcaaaccagattcaatttggttggttaatgtgcccatttcccattgctgccatacaaacttagtagcttcaacagtacaaatcaattacctgtataatcctggaggtcagaagtccaaaatggatctcactgagctaaaatcagtgtcgtcagggcagtgttcccttctggaggctgcagaaaagaaagtgttgtcttgttttttccagcttctagaggccgcccacattccttgactcatggccccctttctctgtcttcagagccagcaacatcacagctctccgaccaatcattcttccattgccacttctccctctgacttggattcctcttctgcctccctcttcttcttttaggacccttgtgattacgttgggccaggacaatgtgcctgttttaaggttagctaactaacagccttaattccctttttcctgtcagggaacatgtttataggcttcaggaaataggccgtggacacctttgaggggccgttattctccctaccacatatagttagttggttgattgttagttgttcagttattggttgtttggtgttggatggctgttttttgtttgtttgtttgtttgttttttgagaatctccttggctcaggtcctcacctgagagccagataatcacgtttgttaaaagaagagaaaaaatgagagtgagcagccgctaaggggaagaaggagctacaagaggcggcacagaaagtggacatcgattttatttcgttgtccatcattatcaatctataaagcacaatccccaaaactacagcacatgccattctggggaaatttgttagctcacggacccccacagaccccagtgtgtggctgtttcatacgtcatgcaaacaggcccttggactctgtctcatgtcctctggcttagaagcagggatgtttgtaatctacaaacaaaaggtcgtctggccaaccttttgagatgtaatctcgaatccagatatactagtgggttccgctaagtgtctattggtcccctagtgtctctcaaacccacggtgggcttcagtctctcccaggcatcagccctaaccctgtggcatgggccctgcccagctgcctcccagacgtcacaccttgcaggctggactgtgtcagcagctgccttgctttccttgctggaaacctaaacctgctttttaaggagcccctcaaaactcttgaaataagatgtgggcattgctcacttgccctgagctgccccttgcagctggggggctgcttggtttgctctcttggcaaagccccttgtttttactctgctggggcccaactccttccttctctgtttccttgcctggggcttctgattccagtaagccaccccaataactcctgcggtgcccccacggctcacctgccaaagccactcccacctgatcccagactatccactcatccctggcctgtgacttgtcccgacctcccagtgggtcctggcttctatcactgaccttctaggtggtgacttcaatcttgatatgctcttcccctgctgaccttgacttcccatctccaaattgccagtgtcatatcaatagcatcacagcataatggctaatgcttctgagctcttactacacctcaggtactgtacatgttttcgctcatttaatcctcatcacaaccctagacagaaccctatgaagaatgggtagtagcccatcttacgcgtgaggagacaaaagcacagagagatgaaacagcctaccaagggtgccacaggtcatatgtgatggagtcggggaatcaaacccaggccagggagtgtcatcatccctcacatctggatttctgctacagtcacctcatactactctatcttatttccagtcaactcccagcagccagggtgaactgtatgtacaatggatcatgtcctccactgctcagagccttccagcagttctcacctcactcacagccttccagcagctctcacctcactcataaaagccagaggctcatgtggcccacaggcccacgtggtcgagccctgctccttctctaccccacctcctgctgtgccccctcgcactctcctccactcggctgcactggactccttactgtttctcagagaaaccaagcacatccctgcctcggtgtccctgtacttgctattccttccacctggattgctccctgcctcctcactgcccatacttggcccattcctttcttaaggagagctttgctgatgttctgcatttaagaaacttaagacctacctttgccgacatccctacccaaagtcttcctatcccccttacctggctttatttttctccatatatttgtcaccaaataacacatgagagctacctgtgttgtttattatctgtctctcccacggggaataaagcttcaggagggcagcacccttgaccactgctacgtatccagcactgtgtagggcgcctagcaggtctttgttaaatgagtggatgaagtctcaggactcccctcaggagcctaaggttctgggaggctccagaccaccatccaacctatatctgttcctgggccaccaagggggcaggccttccattcagcccgcagatgaagactttagcttcactttggtgctcagttccctctacagagcccggcaaacaagagcatgcagcacatgagtatgggctgagcttgagcttttgttctcattgactgctgtgtgtgtgggggtgtgggtgtgggtgtcagtgtgtgtatgtgtgtgtgtgtgtgtgtgtgtgtgctcactcacatgttgaaggaactccattgctctcctctccacccccacccctactccagcaagctgagggtgagaaatagctactttttgtttgtttgtttgtttgtttttgttttgtttgagacagggtctcgctctgtcacccaggctggagtgcagtggcacaaccttggctcgctgcagcttcaaactcccagcctcaagcaatactgccgcctcagcctcctcagtagctggaactactactggcttttattggctgcacgcaccagcatctcactgtgttgcccaggctggtctcgaactcctaggctcaagcgatccacccgccttggcctcccaaagtgctaggattacaggtgtgagccactgcacccggccacagctacttccttcactatcagcaccacagaacacataggtcttaattctcagcccttaaaacccagtccagcccaccagacattatttaaaaataatccaactgagacatctttgtggatctctaccaaaaagatagctttgtcctcccacccattgctttagcagcctgtataggggcacccagagggccagcccaccacacctggggcctccactttgaatccaccaggcccactctaatgggacagggaccttgggccagcgaagcagaaatgtattactgcaacagccccgtggtttcagatccttgcagtagcaggttctgggcatgtgtccccatcacccttctccaacagaaaatagtttatttttattttttcatggctggcagcaaggcagcacctgtggtaacctcgttagtcaattccaagagctcctcagagaagggggaaagcctgccaatttagcaaggatttttggtctccagtagctatgaagtgtgggggggattggggaaataagcccaggagcaagagaggttggggatgagcagtcttctcatccaaatccactctgaggttagagaagaggaaagcacgccattgactggttttctgattgccttcatacatccaagtatgttctccacaatgactttttctctagtgggaagccatggagatggacttagataataccaagtaccatttcctgcatgccttttgcaggccaggcattgtgccaagcccttcagatggtgctcctcagtgggagcttctcagccagggttttctgtcaaagatactgactcgacaatcctagaggatatggagtttatttattcccaactggaaagtgagggactcgagtctctgaggggttaggtgactttcccaagttctcatagcttctaaatggtagggccagaaatcaaatgctgtctgatgccaaggcttacatgacaagctccctccctgctccctgctccccctgcccctcatttctctggcagtcaccagattttattttccccaggatgagaatctgtaaaggtttggggtctggctgatttggactgaaatgggctctgtggcctcttccctgggtcttaggccccatttgaaaaattgaaatggaccgttgaatcccagagccttgcggcatggtagattgtgaaataattccatctcctcccctctccctccccaacgccacacacccatggtgaatggggattctcccaatgaggaaggctcagcaactcccagggcccctgacctgttcattctagaagcttcaggagcagcagtccctgcacccaggctcatgccccagttggcagccaagttcatcctctggacaccaacatagcttcaaaagagtcagtgtcagaaagcctcatacttaccttaccgtttagggtagtttttattttgaaatacatatagaaagatatattaatcagggtcccagcaagaaacagagttcttttcaaaaggatttgactaagaagaatgtagtgaaggcacaacttatagatggacgggcagggttcagggcagcaacaggaatgttgaggcacccaggaactagcaatagtgggaagatgataccagccctcagccaaaggagcaaagaaaggaaatagtgtgactggggcctggtgagtcttggcagcatagaggtggccacctggtgagagcagtggtcccaagggccacagtccctgccatagccaagcaccagagcaaagagggagcaggggaagagacaccctcctgacctccagcctcctgcctgtacctcacatttgccggacacaaaaggaagctagaggcaaaggaagctggtgattcagctcctagcactcagccccaggggtcacagagcagggcaccaaagggaagagaatgaacatgaagggagaaggcaaatggagaaaaataagcacaggggacaccttcctccttttcgtgattaggattgttaccattgcagacctgcctgccacccccaacccagaggaccttgaggctttggggaatgagaagtaaagcccccactagaaggttgaggatgcataaagcttaaaacccttgttctagggaaagtgtctttgcagcctttccatggcacttagtgaggaatgagtcttgtttccagatggagatgctaaagcatccaggcatgccagccctggggaatgcagggaaacagtcttagggatggacccaggccttggtactttagagcttctagggtatgagtcatctttgcctcttaacaatcagatcagtggtacccttctgacctctgtcatttggctgcactggaggcaagaaatggtttggactcacgcaggggcatgatgttagtaaggaaggggtcagaggtgaacctagcttgggtgctccacctcttgactcagagtctgtgctctttgatgaactttctgttaccttgggatcttctacagcaggtcctggtgtgcaagtatttcaagatcaagataaaatatttcattgtgttttatttaggaaaaaaatggtagatgaaagcggaaccaacaggggcattccgtttgtggtttgctgagattccctggaaagcaagcttgggaggccagggtctgtcagaacacaagaccaatgtcttctccaaaacttggatgaacagaaggtgcttacaagctgacagggagttatggggaaggaagcagaatttccagtttggttccaagtcttttctggtcttgacctttagcctaaaaacagagggcccagttgttctccattattactgtaactcaaaaggagacacatgggtccgggagagagttgggaggcaatactaggtttgcacgttctgagttcatggacacccaaggaactgcccctccctaggataactagagccaagccactggacccttctcatcctgtggccttgtctacaattttaatcattttgaagatgaaggttttgaagatgaaggcccagcctcaaaaaggaataaccaagaacaaccctctctccctcctttagtttagatgcttccacagtcaaatgtaaaattattcatgtgcttttactcattattcatctgattttatgtaaaaaaaaaaaaaatggaatcctaggctggtcactgcatggtgttctcaatcacaagccatgagccagggttcaacatgctcccttcacttcagaccttcctcacaactgagcctggatcccactctggacctcatgatccgcctaccacggcctcccagcgcgcccagcccctgctttatttttctatatagcacttattgttaccagatacatttgtgtttatcacctctctcatcacacacacacacacacacagttaaaggcagggacttggtctattttctcaaagttgtgtccccggcacttagaatcctacctgccgtggtgtacatgctcaataagtacttattaagtgaatgaatggagtcagacatgtcctcaagggtaggttcaaatcagggagaatggtgggtgtccttactgctttataggatttcatgctggccccagacttgagtcatttccatcaggcaaattcctgaaatacttactggtcttcctgattctgtggtatgtgcttgtcaacagcacattgtcgaacacgttgctgcctatgcaacactatgtggcaatggctgttgaaactcgttgctaacagaagtgaaagcaaagaaaagcaaagataaagaacgtaatggctgggcgcggtggctcatgcctgtaatatcagcactttgggaggctgaggtgggcagatcacttgaggtcaggagttcgagaccaacctggctaacatggtgaaaccccttttctattggctgggcgtggtggcatgcacctgtaatcccagctactcgggaggctgaggcaagagaatcgcttgaacccgggaggtggaggttgtagtgaacggagattgcaccattgcactccagcttgggcaacaagagggaaactccatctcaaaaaaacaaaaacaaaaaaaggagaaagaaagtaatttccccgccatggatgatatgacatggcagctttcatggaggtttcagaatctgccggcccacctcacacatgacttcctatgcaattagtataaagcaaagagacaacagacaacacttcacacctgagccccaggtcctgaatgtctttggatagcctctctccttgaaggatatattgactcacaggcaaagggcccttataatgatataaaggagaccaagttggaaggaatagatcacaggaaggtgaagcccaaaatccagaagggaatttcagggaaagtggtctggactcaggtaccctgcccagatccatgtgccttccaacacgtggcagacagagaggtgacaagacaaaggaggaaagcatgctcaagggatagctaatgggtgtgtcattcgaccttcccaagacctagctctctggaaatatcaagggttcagggggctgggtcataggcttgctttccttctagctcactgtgtggacctggataagttgcttggccttacccatccacccttagtagcctcttctctggccccttccatggttctgtgcagagtaaagaggtaggacacacagtagggcccagaagggtctcctggcagtcactgatgccagattcagctctcttgactctccatgttggtgacgacaccaccaattttcctttgcacacatggcctcaccttgaaaattcaagagtctacagtcaagtcacttctgcttctaggggcctcccagaagcacctagtattctgtttcaagtcctttgtccagctgctttcaaatcaccaaactcctctctccctcccctccattactacccatggagatccagaggagggacttcttaacttctcagacagtgaattgagggagctcagagatttcttttattcctggagcacagaatgtaacgtaggtgcaccagatcaaaggcatagcagcagcctgagcttctctttgaccaagtcctgggaggcaggctgggtgtttgtgtttgaggatagagtgccagatgttgcaaataaacatagaaaacactcatttaaatttaaatttaagatgaacaatgaatactttttttagtataagtgtgttttataaaatatttgagccatatgtataccgaaaaatgattccttgcttgtctgaaatccagattgtgttgggtggtctatattttacctggcagcccatttgcatgtttcctaaacacaccggcagctcccaaatcagcctggagagagctgagcctggtgcgtggggcataccttacaaccccagtttctgttccccacccatgttctttccaaggaggctggctgccccactgtcagagtgtccaggaaagaaaatagaagagagaaaatggtcatggggttcacgggcattgtgcccccaccgtcggctgcagcagagactcagtgtggcagatgcctccacgtctccagcccaggcccagtcaagcaagggccctaagatctgcccagaaggagaaggtgtgggagggggcggtgcccgcaagtggaggtgggggacaggaaagggaagggcccgcaatgccagcatggagcttcgaaggggactttgaaaggtgctgcctatgaagcactgctttcctccagagcagccatcctacctgcctgccctgagacccccgctggctaccattatcccaggacaaaacagggcccgggctcccggttccccctcatttcctctttcagtgtattttctctcctccatgttctggaagtttctctcagtgtaagccttgtcagggaggcctgccactctgccccacctcttcgcctcctgcttgccctgcggccagctgtggtttggcctgatctcagagcttagcacacagcaggtctcccagggttggaggtccatcctacctttgagtagctgtgtgaccttggaggaggcctgtcctacctttgagtagctgtgtgaccttggactacttagtgctcggcacctctgcttcctcatctgcaaatgggcactctgggcaagatgaagtgagtcactgagtgggaagtgtttgggacagtgacccgcgtggaagagacattgttatacacgtgggctttattccacccctgctgctccactcagctgttcctcagtcacctccactgattttgttcttagctgtagcccttcttgaacccctgccgtcctaggtgcacacgcctgccccacacctcccactgtcccctccctgggtgcccatgactctcttcttccctttcagttattttcctctctcagacccatccaaccagccccatttccccaaggttctgttctaacctctctttaatcctttttcccttggagatctcaaggaacagatgggagcctcagcacagtatagccttgtatgtgcacaggccatttccacacggggcggggacgtggcagctgtgctttggcggtcatctctggagaagggcggctggggctcaggaggctgagggagctcctgcttttcactttcttccctcctgtgagattcagtttttttcataagcattaattacttttattaatatagtagaattgcaactgtaatgtaggatttttttttaggagaagggatagattacctttgaccaggctctcagggtttctttattaagtaatctgcctttaagatgggatagggggagggcattcaaagtaaagatggtcccctagttgtgatttttcgactttatgatggtgcaaaagtgataggcggtcagtagaaagtggcaccacattctcccatgatgctgggtggtggtgtgagccatgtctcccggtcagccagctggttgggagggtaaagggccaatgccgtacagtgtgctgtgctgctaggtgatgttgcccagctctgggctgtggaagcgttctgagtacactgaaggtgggctaggctcagctgtgatgctcaggaggttaggtggatccagtgcattttcactggtatttccagctcaccctgcatttatctggatgtaatctcatcataagtcaaggagcatctgtacaacaagcagtctgagggaaggcacagaggagaggctttggcacctggaaagaaatgtcgggcctcatactgcccatagtaatttgtagattcaatgctatccccatccagctaccattgactttcttcacaaaattagaaaaaaactactttaaatttcatatggaaccaaaaaagagcccgtgcagccaagacaatcctaagcaaaaagaacaaacctggaggcatcacgctacctgacttcaaactatactacaagcttacggtaaccaaaacagcatggtactagtaccaaaacagatacatagacaaatggaacagaacagaggcctcagaaataacactacgcatctacaaccatctgatctttgacaaacctgacaaaagcaggcaatggggaaaggattccctatttaataaatggtgttgggaaaactggctagccatatgcagaaaactgaaattggaccccttccttacaccttatacaaaaattaactcaagatggattaaagacttaaatgtaacatctaaaaccataaaaaccctagaagaaaacctaggcaataccattcaggacataagcatgggcaaagacttcatgactaaaacaccaaaagcaatggcaacaaaagtcaaaattgacaaatgggatctaattaagctaaagagcttctgcacagcaaaagaaactatcataagagtgaacaggcaacctacagaatgggagaacatttttacaatctatccatctgacaaagggctaatatccagaatctacaaaaaacttaaactaatttacaagaaaaaaacaaccccatcaaaaagtggtcaaaggatatgaacagacacttctcaaaagaagacatttatgcggtcaacaaacatatggaaaaaagctcatcatcactgatcactagagaaatgcaaatcaaaaccacaatgagataccatctcatgccagtaagaatggcgatcattaaaaagtcaggaaacaacagatgctgtagaggacgggagaaataggaatgcttttacactgttgatgggagtataattcgtccaaccattgtggaagacagtgtggcaattcctcaaggatctagaaccagaaataccatttgacccagcaatcccattactgggtatatacccaaaggattataaatcattctgctataaagacacatgcacacgtatgtttattgtggcactgttcacaatagcaaagacttggaatcaacccaaacgcccatcaatgatagactggataaagaaaatgtagcacatatacaccatggaatactatgcagccataaaaaaggatgagttcatgtcctttgtagggacatggatgaagctggaaaccattattctcagcaaagtgacacaagaagagaaaaccaaacaccacatgttctcactcataagcgggagttgaacaataacacatggacacagggaggggaacgtcacacaccagggcctgtaaggggctagggggctaggggagggatagcattaggagaaaaacctaatgtagataacaggttgatgggtgcagcaaacaaccatggcatgtgtataccagtgtaacaaatctgcacgttctgcacatgtatcccagaacttaaagtataataaaaaataaaaaaaatttaaaaaagaaatgtcctgcctcagctggtggtggcaggtgctgtggctcactaaggcctcaggtccattggctttacctgacaggtttgtctacagcgcctgcagacctgccaggagggggtgacactctttggagacagggtgatcccctaatagtgatgtaagtgggaggagaagctgtaaaataagtttaggaaatagagactcccccacatacttttgggggtccaggtaagggtacaatgtagaccagctttcatatgtccaaatatttgaaagttacaaatcaagctaacaaactattacatagaatatgttctctcctcttgccttgacaaacgcaccttcctgatatggtgaaggccaaccttgaatttagaacccgtggacccctcagagttccacactggaatgtggtggccttgggggagcccgcctgggctggtttcagaccctggctccatttagcactaggaagggccttgagcacacatgtgtgggcactcagctcacatgtgcaagctccgcagtgccctcaagccacccctggtcaccacccgaggcctatgggtgtgcacaccagtaatgtgatccacccacaacttggccttgggcttaggctcagggaattgaccagggaactccaggatcagaatgcacaaggcactgtccaacgtccagcagcagggcatatgtgggtccttggggccatattcctttaacctgtggacacttcacccacggctggaggtgagccagagcagactccctaatgtgtgggccacagcaccggccactccagtcaccagatgaggacctggcgggggtgagcttagccaatgaaaaccggaggaaggagctttaaaggtttcctagaagagtcctccagatgcccaggcgcccccccaccccccatgctggggctggatttctgcccaacacctcgtgcctcagggtcattcaggtgtcaccgtctcatgctcctgacacagtgaagagcttgttttcctcctcacactccctgactctaatccccaccagcctgtgccacttggctggcctccttggcagaaaggtgacaaaaggacacgtctctggagagtcagatccctcagctgccggaatctaggacctccttggggccacataagccaatggctgagggtcctgatcttgttactgatctggtttccttcgacctcttatagccagggtgttggtgggagtcactcaagcaaattcattaatcttaaggaagcaggagctattacaatcgagcaagcctctttgcttctctctaacgctcatgctcccatagcattgccctcctgccctgatcagccttccctatagaaccttacctcccaatgtttcctcacctccagccagctcacctctgccactgcgcttcttgcctgctcccaacatctgctcatctgcacctacccagctgttcttatttctatccaaatcgctttcgtccttcaaggtgacttgagatttcacctccataaaaggttcccaacacttccatcgattcttcccctgctttatcacctgtattgtttaccacctggacccaacatttggcccatgaattatgttcatgttagtactttataacatatggcatttttattcttccatgttatgtagaaatcatagaactagaagagatcttaaagactacctagtcccatcctcattttctgaacatgaggaaaccgagagagaggaaggttgttgtaacttgccaggcagagccctcagggtttggcagagctgggcgttacactcaaattacactcaacactcttagcccaatccaggacttgccacaagctcttgatgcctctctacatagaagtctgcttcacccataggatgcggcggtcaggaaggtcagtctcagaatatactcaagtgggcaaatggggccttcccattttctggcaggacacagcccagagaggtgcattcccacctctgtgtactctattatttaagttatttgcattttaataaccagcaggcaaaaaaggcagtggtcacctagattttctcagaccagccttgattccctgctgtctccccatggggaatttcaggaactcccttttcttcagagggaataagcccaattcctgcttcaccatggcagggaggccggctccttttgctgccaatccccattatccctcgcatttccattgtggaagtgcagagaggttcttagcgagtctcccctcggactttcccaggggctcctgacgaggagccccaggcgggaggctgatgggctaaacaagcaaccaaggaatagccaaacaggctccaagtcagagcctatctttaacaaaggtgggataaagggagcaacaaactagaaggcagaagggtagggaggggctggggacaggatgacctgtcccaggtaaggcccctaaatgctaagtaaattccccaagtcaaaatcagctggaacagggcagagcaaacatttttttcctccccaccccgaccccgggtgtcctgctcactgcaaggaagaaaaacagaataatgagccacgttggagagtgtcactccagcagctccggaaagacgtgggcagacgcctggctgggcggctgactttctctgtttctggtagagattttataaatattcggggagtttgatctgaggctgttggtggggaggcaaggagagctgcagaggggggagacaactcagcccacgggggttcttggacctctctaaagcctgcttttcattagcgtcgccaaggcaacggctcatctgctgcagatctcatcaaggccctgcaaagcatccacggcacgttacgctttgcgtttcacagtgaatcggctgcaatcagtcttcctgcagccctcccttacccccatcacctcctagcctatggaagagaagatcattaaaggcgggtgaaaaactgcaatcagaactctccgaggctggcacggagaggcagagctgcgatagtcctgttccgaggacagtagattcgccctgaggactattcaaagctgggcagtgatgagcctcaagtaacccgatggacctgtagcaactccccagctcagtcttcttccatggtgcacactcagccttgattcttgtctcctccctgcctgacctaacctttcccctccacacacctttattttttaccaaggcgaacatttgcggtgcgcccaagaacctcaccggcccttgtgccgatcggttccagatgcccatggaaatgcaagctcatgtgtttctctggttttaacaaaggtgtccaatgagttctaagggtgatgtcaggggaggtgggggcagaccagggagtaaagggagacccatgttggcaaagcagtgtgagagcaggtgagtgggcccaaagagtagggccaggtgtcatgctcagcacagccaggtagggaatgtgcacagaacacattaattcggcttcacagacactcccattctcagcatgtaccccatggaaatccagtcaccccctttaaaagttggctccttccatggccgggtgcggtgtttcacccctgtaatcccagcactttgggaggctgaggtgggtggatcacctgaggtcaggagtttgagaccagcctggctaacatggtgaaaccccatctccactaaaaatacaaaaattagctgggtgtggtggcgtgtgcctgtaatcccagctacttgggaggctgaggcaggagaatcacttgaacctaggaggcagaggttgcagtgagtcgagatcacgccattgcagtgagccgagatcgcgccattgtactccagccaacaagagcaaaactctgtctcaaaaaaaaaaaaaattggctccttccagctttgagatcctgaggccagcagccagggatcctgctctctgctatatgtcagtgttccagcacagtgcctgcgcataagaggccctcagcagtgtcttcaaagaaggaacccctctgtccacacaaaagagggggagagtggtcagggcactgcagaggttggggttgggttttctggttgtctttctagcttgtctttgtgctggaaagcaaacctgagctccagcctctcccagcccctcctttctgtggaatgcagatcaccccagctctcctgaaagattggtactcagagcctttgagcaagccctgggaaaatgcagaatctcaggctgtaattacgagctggagaagatccctcccccagctataaatggagcagaaccaggaacccaagacagctgggctcacacaaaggcagccccttgctttcttgcttgctcctacttttcccactgagcttggccctggagaagcaaacccctaattcctctgctggtctgagcaggaaattcccgtcagcttgtgggagaggccatctgagagagatttcagcacatccatcccccccgagatccagaaccgtatcaagtcctaccccagtcccgcagagcagcttcttcctccacagcttctgagctgcaccgaagcaggcctccgccagcctttgctacccaaggctgatgttgggtttttaacactcagccaagtcatagggaagagtaagatttacaataattgggtacatagcatagctgactgggctgcacagtgtggcttttggtcagttctggcattctggtgggaaagctgcactgaagaggcagagaaatgccagcccagatggcagacatggtgcatttaaaaaggcagtgtggtatagatcctcgctcctataaacgcgggcctggaacctgcagcaggagcatcacctgggagcttgttacagaagcagaatctcaggccctactgaatcagagaatgggttttaacaagctggccagcggacacaggcacattcaagcttgaggcagagtggagcacaggaaagaacatatgggtgcgttcatcccagccttgtggattcctaatgccagctttgtcactcagtagtatgtgactttaagttaagctccctctctgagcttcagtttcctcccctttacagcagagatgatgtaacctattataaagggctgatgtgaggctcgacctggtaccagcaggctcctaccctagtcaatgttagcagcacagagatgattgctcagggaacatcaaaatcctttatttccccaaggcaactacctaggagatgcagcttcagtccgtcctcttgctatttcacttttttattttctggggagacttgtagtcccctgaccatgaatttcagagccaacagtggtaagcttttcattctagctacccccgtgtgaaattaagatccagagtgcccccagagggaccaagctttctcatgtagaatagatcgctatgggtgaaggaactgaatgaatgcggtctggcagggtcagttctggggacaggggcattccaggaagaggagatacaacatgtaactttcataatggataaatggctccttggcggttccccacaagtgagtagtatcgagtctggatttcatttctttcaccgtctgtgagtttccttgagagagagtaggattctcttgtcatggggattggagttttaacccacttttctttgtttggtgttggtgtgttctgtcattacagtcccctactgctttcccaagctaatgtaatggaacacagggatggacaagccacgagggtctgcagggacctcaatgtctccataaatgctgggctgattttgcaaagctgctttcccaacggggcttggctaaagctgcttttcaaattagttttgtagaggaaaggagggcaggtcagctcccaggtaccagttgggtgacctggggcgagtcccttaacctctctaagcctcagtttcctcctaggatgataatgctaatacgagaatctccttgaagacagccatgcatgtctccacccattctggggataacagaattactggcggattaagtaacgtgatacttacaaggaacatggtacagagagtggaatatggtcaataaatggtagctgccatttttgtagtcattagaagaggcgagccttgaacgactagcctctgttgaaaattacaaacaagagagtggcctacatttgcaaacagtgagcatagccacccattcctgttagggtcagcaactgaccctcccttcccccgccttcacttttttttctttagctgcaggagttgagacatgtggctcaccaggctacctcagtgagttaaagctttaaataaatacacactcaaaacggctatcacatcactgcccccatgactgccacaagcccctcccgacctgggaacgtctcttcctccctctccctttctctgctgctagaggccaggccttggctgagccctggagagggtatctcctttgcacgtatgctggtcccaggggccctgcacagggcagatgagggtagtcctgatcctgtacagactctcctcttcctgggtttgttagaagcctggccaggcccctagtcttatgacttcaacagatgtttctgcttaaggagccctggcatctttatggcctgttttttccattcttgcctctcttcctctgtcccagcagccctgaatgcaatttggactttattttctttctaatggttacagggatagaaagggctttttcccccccattttcagtttttggctttttcattagctcatcaagctgggtatgtctgtgttagctcacacagacatattcacacacgaacacacacattccatatgcattcagatctgtacccatggtgtgtatttcttaatgttgcactgacatttattgccacttcagacccagcccatttcaaagccttcctccctgcctccaccccacacttcacattcatcctctgcctagcctcacacaggtcaccctgagcagccgactggggtgtcacccagatgctgattccaaaaactagtgctggcctcggcctccagcaagatgtgtagagcctcagtaactcaccagtctgcctctgtgcttccaaggagtcttgggctgactgatggagtgagagctgagactgcatttgccatgcatctcttcaagctctgcctggccagccagtctacccaggctcagggggccaagttgacagctgttaaaaaaaagaaccagttttccatgagcaggcttgaaaccagtctggccaccccttggatctacacctgtaactgcccccagcttgccagcatggcagggtgttcccagtcacctcccccgcagcgttgggggttgcctgtcccatcagtctggttcccagagcaaaggaaacctggcgatgtcaggtcttcagcttttagtctatctatggcaaaggtgcctggggctgggacctctttattacctcctaagcctgaggactggaactgaacttctcactgcaggtataaataaatctacctggaatcttaaatgttgataccacctggctgccttacctgaagttagacccattacccacaagaggccatctaacctcaaattctctgtgtctctgcagcccttcttcctaggagggcaatgatgccgaatcacctgttatggcattttcataattcagctaaccattcactactctatctgcccatgatccacccaatgctgaccatgggtggcggggcagagtggcctctctagaatgtctcctctttaacaccctcaccatggaggggcctttatagatggccccatgaagttctcactaggcgactgctcctacctgagatgggccaggcagccatggacccctcccctcccctccggttcctgccctgcccaacctcattctgatggtttggccttgtgcatctcactagtgactcttttcttccctccttcctatttaaacaaattaaaactccagtttttcttcatttatgttttggtggctgaggtggagcatcttttccccagtgggttaagagaggctggttggagaagacagcaacaggagagtgagttgggtccccagtggcatagtgacatacacagggacagtgggaaatggaagctggaagaagtcccagaagtaggagcaagaagagtgactgtcctccatgctgggttctgccagggactctggatgcgctgaacaacagccatcctagagatttgaggacacctcttctgtttgctttactcatcacagattcatgaataaagacaaacaggggagccacctcattggcttttccatctctaaataaatcccttctgaatacacacccccaatgtggatgctatggatgcttctcaagaaacaaccatatgatgctatgataatcgatatccttccaatgactcaaatcaaatcaacttgaggagcctgatgggtctgatgctcttcttccctgggcctctgcacctttccagagccaggccccctgtgtgtgtgtggccggtggcgtgggggagttgcttcttttcatttttgtgagtgaaaatgaaagggttccccacaaccagctgcaacaaggatctctcaccctgttgctaaggagtggtggggtcctgctaccatgtggtgctctggcaggcctggggagatctttagggatctggagcagccactggatgtgcagtcctgagcccctgggatgtggaagtgattggccggccacctggatgggcctcacagtcctactgtcactcctcttctctcctttcacttctggatcctgctagagaaatggagcccggggaaactgtctcaccacctaggactgtgtggagctgggcacacactcaggaggcaggtgacttccaggtagtcaaagagaagctcacactccctgtcctctgatagtcctactccctgaaggatctggtcaagccattccttccagatggccgtgatactgtgtcccctcagtattaggagggggggaattgatgctttccatgaatgaaagctcctaaaccccctcccccgcagctagggctgatggggaatggctaaaccccagatgtcttcattgcaccataaatgtgagcagggaggtacaaaggggtaggcaatgatgtgtgtgtgtgtgtgtgtgtgtgtgtgtgtgtatgtgtgtgtatcaaagagaggagtctgtcacaggaaaaatactgagtggccccaaatgttgtaagcgtatgcaccccagttttacaataataacaatcataatactaataattttgctatcatttgttgagatctttttctgggccaggtacggtactttgcacatattatctcataattctcaaaatctctgtgaggtacaagtatcactatgcaacttttcaaatgagaaagcgagcatggaaaaaaagttggttcaattgccaaagatcatagatctgagaagtggcagggccaggattagaatgctagagctcaaagttcttctgccacgtatcatagaagcgaccactacatcgataatggtaactgccaaccctcactgttcactggccacatgccagacacatagattcacttaattcattcttacaaaactctggatgtattcttattgcctcattgtatagatgaggaaactgaggcacagagcattttggcattgattcccttcggcaaatgtgatttgaacagctcctatgtgtgtgcagggcaccgtgctcttggctctgcgtgggatatgggactgagtgatacgtcattcttatggtctgagatcaggaaggtccatggccatggccatcagaatgggctcagggtgggattccagaacttgaaatgagggaccttgcatcctagggtatgctagaaagtggaacataccaggtctctagagaaggaacctaggcacagaagcaagacagagtcctgttgtcagactgaggcaccaggtcagaactgggccagcagcaagggctggcggaactggaactgatttattcccgcctgcagcatggcctcgagggcagggctccagagctaggctgctaagttcagatcttccattctttagctgtgagaccgtgggcaagttaatgaacctctctgggtttcagtagcctcgtctagaaaacaggaatcataactgcccacctcatggaattgttctaaggactaaatgagttaatatgtgagaggctcttggaacagggccaggcccatgatgggctctctggtgggctctcaagctctcgccagccgatgatcattgggccctttgatgctgagtgggcagaagctgcaggtaggggacaagttgtcccagtggcaaacagaagaaaattgtagtaggaactgattagggcctgtctctgtaggtggtttgatggggagggagagatgaaatccaatgggacaagagggaattcacatcattagtataaaaggttggcaaatgggcatgggacccttccttcttagtctccagaggccaagatgcaggtgcctggcacctgggctggctgaaagtggggaatgtatcagggctggcatttatagtgatgccactattgtctaattatgggcacaaagagaggctcccactgtctgtgcagcccctcaaatcacccagggaagaaatattggtctattcccagcattccctctgtcaactccccaacctcagtctctggcttggaagaaagacggctgggaagggggatggaaggcagccatgctctgttgcagtaaatctttcctagaagaggagacagctgagctcatcagccagtgtcggatcagctcagaaagaatcctttccaactcccagaagacccctcagcggcttgggaaaggaatggctcactggggcactttgtttgtgtatgtgggcctgtcaggctgggcaggggtgtctgatgacacattaggacagctgaaaagagaggtgggacaaaaatgtttgcccaagggcagtcttgtgattcccccaccccccgtgctccccacccccacacgcctttgagagcttgttccaggacttttcatatgcatttgagaccacaatttcctctcccagaaaccccattaagctatgagtgagtgaggcggtgggggagagagagaggaaaaggaaaagagagacagagcaagagagagagtttgtgtgtgcacacacgaatacttcttccccacccgcattcttttgcacatgtctaccgttatgtacattcctatgccataccccttgaactctccatcaggtcttcctcaaccatcctcttcaggaagcctcagggcctcagagaaaggcaaaagggcctagactttgacttccttttttttctctctctcttagagacaacattttgctctgtcacccaagctgaactgaactgggctccagaaatcctcccacctcagcctcctgagcagctaggactacagatgtgccaccatacccagctaattttttaattttttgtagaggtggggtctcattatgttgcccaagctgatctcaaactcctggcttcaagagatccacccacctcagcctcccaaagcgctaggattacaagtatgagactttgccattccaatgagaattttgtccttagcaatctcatccaatggccactggagatgtgtgtagggccacaagaatgagaaagggggcaatggagtgacaggtgacctgctcaggtgcccctccccagaccaaatgtcccaggcacacagcccatgccctccaccatggagtacattttctccctggcttgctgctgagctaaaggaccagggacgtggaaacaggaggtgaactaaggcaccccgccacccactgtggcagcttgaatttcttgaggctgagacaaactaggatccagtagcctagattttgccccagtttctccactgagtatttactcagtgctcctgagccgatgccttcccctctgcctagatgaaccacagcattttggtaaatgcctcagcatgttaggagcgctggaacgtttattctcttccctcccaattatccactctaatggagcagaacacttacatggaaaatcctaaacatggaagatgatttaaaaatgattcaccctggaatacatgcttccagttgcttctacaggtttaccttgctaaaggcatttcgcttcctttgctgttacaataagcttgcctgccttgaagaaaagaagaccagggccaaagggaaatcagtcaagggagcctgttttgtctgaaataatgcatccatgaacaaatgaattgagtataactgtctttttacatcagtgtttctgtggaattaagagaacatccaaggccactcctagcttgagtagattaaatttgtccttgtgtttggagcaagggttgtgaagtctgtctggcccatcaaatgaccaatggcttttaaggaaggactaagtgacttatgaccagaacaagggagcagcctgagtcagtctccccaatgtctacattgtgttatttatactagcaaaaaaatagacacaactaaatgttcgaccatatggtattggttaaattaacatctatacgatggaatactagatggtcattaaaattatgtgtcagaagaaggcttaatctcatgggaaagtgttcacaccatattattaaagagaaaaaacagattataaagcaatatgcatacaatgtagtagttctgtaagaaaaaagtattatgtgcattttaactggaaaaatatgtataaaaatgttaacagtgcaatctctgggcaataagattatacttgacttttatttcttttttggaattgtcttttttttttttttttcaagtttcctcccattaacatgcatgttcccaaaatcaggggaaaaatacattaagaaaaaaagattatctgagagaccagcagatgtgtttcctgtttcttatcccatgtctattctccattttatattggagattcaaattcttcagccctttccacaacagacacttctggggcaagaggcacagaatatctgatatcctaaacaacaccaccagggtgaatttctcactgacagtaacagctttggaaaggttttgtttctacctggcgctgggaattaatcgtacccaaacttttttttttctaatcagtaatgagcatctccaagggggtcctagaagggttccaggggttcatggaggacaattataaaccttgacagctgctcggtgggttttcaaccatgggggtgattcatcccttctcgtaagccttttcatagcaccctacgctcagagttttgaaaatgtgacaaaaaagaaaggggctggggagaacaatggcccttctccttttatggaaggatgatgaagggaattgggaagagcaaaactaagggactaagacaattcagcttttttttgtctggctcataggaccgtgttccccatagagtaatgcccaatgagtggacgaagggagtaataaatgagttcatagaaggaaacagctgggctgctgtaaaagctcctgcaaaacagataggcctggcacacgccatttctgtcacaggttttaaagaacctatctagctttcagctactcctcatcaccatctcctacagaagcagagtcaagatcatgtctcttcccatcgtaaggaaacagcactgcgaatgttccagctgtcctgaagtcactaatcccgtcaggggcagacattggcaacacacccagaaggtggtggggagtgcagctgtcctcctggccgactgttccagccggtcacctctgctgctccaagggtgccacgttacctaattctggttcacggtgagatggcggcttttctcggccagcttgtccttagaaaattcgttcccttgttgtattggaaaattcctcttgtgcctgtcattgcacacatcaggagaccaaggtttccattttctcagaagaaattagccagctactgtcattgacatgaagcctgttcctggaattttttactcctcctcttaaaggcatattctggaagaggcaatctgagaatggggcccgtgctctcctacagcagagaaataaactgaggctaggccaggagctgtgcaccgtctgggggaaccatacccagtggggagtggccagatcagtcccaacactgaaattgtttactgtcatccactcctggttgttaggggacattgaggatgacaggatagagagtagggaaggaaggaccagccaaggaacattttccctataaaatgagactcccaccctactcctgcccttgttaagacttcatacactatggaatactatgcagccataaaaagaacaagatcgtgtctcttgtaggaacatggttggagctggaggccattatccttaagaaactaatgcaagaacagaaaaccaaataccacatgttcttacttgtaagtgggagttaaatggtaagaacttatgaacacaaagaaggaaacatcaaacactagggtctactcatgggtggagggagaagaggagggagaggagcagaaaagataactattgggtactgggcttaatacctgggtgatgaaatactctgttcagcaaacccctgtaacacaagtttacctatgtaacaaaccttcacatgtaccctccaaacctaaaatacaagttaaaaaaaaaaaaaaggacacagatgtaaattgaccctgatggagagaactctactctatccttgccaggtcacaagaaggtgagatatttacttttcaaatgattgatgctgaaatggaaaggactgtatctcgggggcacaaacccaacagagtaaatgaagatcctactgcttcagctcctgggatttgttaaagtggggaccagcttagaaaaatagacggccgtcctagagacccatggcagtctcggtctgattttaaatctaaattctcaagtacaagtagcttcccaagaagagaaagctacttctacataaagaggtggtatcagtaggaactccttaagccttacctttttattattgatgatgatgaagtgaagcttcctgttgatatcattgtcagaccaagcacagcacaccaactcaaacctcattcattcattcattcattcatgtgtccttttaacagacgtctactagacaccttgtgtgtccatgaaccaaataccatgcttaagaccaaggattcagaaatgtgttagctgtcattccccctccaggaactctcagccaggaggagatgtactcagggaaaaggagaaatcacagtataaccattgtaaaatcctttctgataaaatcgcagagtgtctaatactcctgttccacatacataaaaagaaactaaagtgtagagaagggaggaaagtcccgaatttagtgtgtagcagatccaggagtaaaacaagcattcctcggtctggggtaaatcccaccgggactgtgttgagacccaaattcctctgagtccacgggccccttcaagtcagatgaaattccaaacaagccagagcctagctgaacagttccacggtgccgggctccagtgtgttctggaaggttctcgtgggctgtgcctccagaagacggaggcggggaggagccccacaggcccagggcagtgtcaggttcccccttttctgtcagcaggcatggaagagcctttaagaaaatggagtattattattatttgtttgtttttacagtgactcagtctgtagtaactgggttaaagtccgctttgagaaaaggagaacaaaagacctcctgttagtgctggaagtttgcctcttaagatatcactgagaggaactgggaagaaaaaaaatccccagcagggcagaggaagctgcaggccttcaggaacacagcagcactttggaaaggaaaacacggccgactttcatctcctgcgccgtatctgagctggccgctccctttgccgctgctttatggcccactgcggtgctgaccgtcggacatcggccagtaccctattcccacactctttgaacacagggggctgccaggagtggtggtagtgtgggcatatctccatagccaaccaaccccaggctgaggaggagggaaaggatgttgccatacgaaacatactacgtgctggacgttattctaacattacatatcataactcatttcgtaaacaccaaggaggctagcatcctccttctccagccacagcagaagttgcgcaaggtggaaatctggccctgccctgtttaggaaactcattgcaagtagaggaaccgtggggtgagtaggctcccaaatgggtaggaccagattgctaggtggtctcttccaggttgcagactcaggccatctgactctaagacctaagaacttaatcctactctcttcaaatgaaaacagaaagtcagaggaagacaagaaagtttttcttctcacgacctcccatcagatccgccccatctacattaaacttgtacccgtgtccttcatcaatcagctcagtggaaatgttattctcacccttggccacccagatcaggaaatcggtctggaccatgagtgacatgctggtgttggccttcttcaccataactataagaagctggaatgttcccctccaaggctatgaaagaaggatggagacaagaaggaaaagacagaaattctgtgaaagtctcaggtccttcctcctttcggaaccacttcacataatcctcttcctccccaggggctcccgaaagattaggcttcacttgcaggtcccaggccctggtcctgcagagtggttgggcctttggggtctctcagagagcctaatcattctgttttctgaacaagtcatagttttgctgacttctgaccaaacccccatcgaaacccaagagtggaagtgtgattgtggtcatctataccctgtccccctacaggactccctgtcccacgggatgcagcaggcaggtgtgggaaagcctacctgatggccgagatcattaagcagcggccctctgattttctgtacagctactcagtgacttggaagggattctttgcactaacaagcagtgcctccacaaacaatgagttgaggggaaagactcaaaagaggccgatacaatgctgtttgggatgtttctccctttggctggcctcaggggactgggcccgtcatgtaatcactggagatttagggcctaattaaactctggcattgggccagcatgctggtggccccttgagtttcccatgtccacccatgtctagggtattaaactctagactgggagtgtgtactgcttaactgatcccacaggagccagccctcattatccaacaggctgggtattggcagcccacagggctcggcattggcaggtgcagtcctggggaggactgcatgcctttaggttaacggtccctacatcagcacccgctggggccacagtagagggctttgtggatcacctctgccattgggacccctggcatttccttcctttcatggcctgataaaacccaagctctgagagttagcaaactgataccctttaatcatgccttatatttataaaggcctttgtccagagaactccaagtgctcaaaaatgtcaattaattcactctcccagcctcctttagggaaaagctggtggcaggtgtcatcatcatcaccagaggtggccaaatcatcttcttagtgggctgtcctggatattctttgtgtttaaagagcattttgcttctgagcacatggttgggttttgcacagcctgaagcataagaattgaggtatttccttactttacagctctagagaattcttgtgtgtgggtacccgtgaaacacaaactgagtgcatgctttcttgagtttggaaattttgttattgtttggtctcagcatttgctggtagtaaataagtaagcagaagtaagctgcttaagttcccatgtagtccaagacagagcagacaaaagacctgatccccaagccccacacctggccccaagatccctctgggattatcttgcggccactctctgaagccttggaccctgtagttgatctcatagccacgtctcaccagtaactttttttttggtgggggggtgggtcctggcaagagatgggtgatgtaggaatggcctagctgcagaaggaggacagccaggtaggacatctgcctggctcacctccttcctggccacagactagctttgtgaccttggttggcagcgtcattttcatgtcggctatagtttccatgcctataaacagaatgatgatacctgccaccaacttttccctaaagggggctgggagagtgcattaattaatgtttttgagcacttggagttctttggagaaaggcctttataaatataaggcatgattaaaggatatcagtttgctaactctcagaggaagtacttaatgggatcaggcctgcatatgttgatgactgagtttcattcttcattcagatctgcacagggctcccatcactcagctctgccgccattcatgtagtattcttctgttctttcatttctatatactcatagtagggggcccacaaatgctgccctccacatgcaggcccactacctcccctccctcttgtcaaacccaatggcttttcctcactctgcattttccttgtcctttctggaacatgacactggtcactacccctcctcacccttgaaagtcttattctgtcattcccacaagcccaacaggtctaaactgaagtcatcattgaccccaaaccaattcccatcattactgccctatttctcttcaccattctcatgggcctggattccaggtcttcctctccactgccaccccctctgtgcaagccttattgtcccaacctgcttggtcctttgaaaagcccatccctgggcagaaatgggatgtgtatgtccctaaactgcccccaaagacctctctgcactgtatttgacctctggccctcctgttccctaactggccttggtctcctgctcccttccgtgggccgctccagctcttcccaccatgtgacctgccttcctgcttgtccaccttcctgtctggtccccagactcagtttctactctccctcccagcaagctgggacacacaaacatagacatatgttatgttcacacaaacatagacatatgttcacatacccctcccagcatcctgactggcccagctgacctccctcacccactctgaataaccagctctccctcctcctgcctttgtccagtcccatctctattactcagggctctccagagaaacagaaccaacagggttggatgcggatagatgggtgggtgggtggatggatgatggatggatggatagctagatagatagctagctagatagatagatagatagatagataatacatgataggttgatattagatgatagaaaagcaaatagagtttaagaaattggtttatgcaattgtggaggctggcaaatctgaaatctgacctcagtctcttctcttaaggcctttgactgattggacaaggcccacccacgttgcggaaggtaatttgattactcaaagtctactgatggaaatgttaatgtcatctaaagaataccttcacagcaacacctagcctaatatttgacgagatatccgggtactatgacctaggcaagtcaacacataacattacccatcatgcttttcatctggtcagcagtgctcgtataaatctcctgaaacattgctctcaccacaatgcttccctgctccaaaacctaaacacccatatgcctgacatgcaatagggacaggtacatatttgttgagtgaataaataatgaggagcctttgggatgggctacactctgctcaatgcagcaaaccattttgagggcctaatgtctggagctgaggatatgactatcaaagctgcccttacgtgttcctctcctctccctctagtgtctcaaggccagagtccgaacctcagacatctctaatcccccatagtacccaatggagtgccttatatggattaggccctcaatcacttgtgggttaattttattctctttattgatccctatatcaaatttacctgaaatattataggtttttagggcgtcacttatgaaatcataaactgtagtgccaaatctgcttccacttttgtttttaaggcacacatgcaaagagctatttccacaatcaggaagggtggaaatagctcagaacactgacagtggtctgtagggatgggtggcttctatgggattttttatacttttctgtgtcttccaaattgtcctctgtgaccacgtgttgcttttacaaccataaaacatgttatctgtttttttcatttatcttttcgatttgggggtctgttctcagctcttttttggggtccccatcatgcctcctggcttccttttgaaaataaggcaacccgagacttccttgtaaaagtctgtgaggtcataaaaggccaagttaactgcaaatggttgttctgttttaattctgttgaagtgtcaggtaacatggacttataataaaagcacttggggagttaatgattactgctgttgtcaagctgtcccaaagacagagagggagcctgcacacgccgcgtctcgccttgggccgctccttcagtgtatccagccctgcggccgcgctggccccctgtccgcatgctgtcaggctacctccgtgccagacgaccaacacccagccacagtggaaatgactgttccttcaactttcttcagcccctgcctgctggggtctccggagggaagcgttcactctagcccaaatgaaacagagctccagaaaaaccacagtggaggccacagcggcctcaggccctgaactttgtatttcttagcccgccaggattgctggctgctgggtgtcatgtaactcccaaaaatgtgaagggaaaaccaaagagcctgagaagcgcagacgtctcctggctggggagtccgtctagaaagtcgcctttcatggtgaggccaggtgcacgcgagagtggctggagaaggtggggtgagcccagaacagggaggcccggcccactcccaggctgaaactccgagaaactccccctgcacaaggccacgccaatgaagtccccttccttctggaaagggtcctacacaaattgctagggtttccagtgtgatatttgacaagtgcaaagggctggaaatattctagagatttttcagcttcgtacaattatcggtggccactgagcccatctcacctcctgtggtgtcccgccagtggctgcaccagccaggcggggctgccttttgtccctgatcctgtcagccctccagtaaagtgtgcttaaccaggtgccccaggagagcagggggccagctccatgtcctcatgggtgtgcagcccctcagcccttcctcggccctgcccattaacagctgtgaccgcagaaaatgccccagcggcagcgccatggtccccagggctgccctcctgcctccctctaagtcatcgaaggtcaaggttggagaaatcttagtgcccatgggccctcctcctcactgaggagcagagcactggctcaggctcactgaggacagggccacgctgctctggtctcatgtacttttgtattctgggagcctagcactcagggctccctgagtgagtgaatgaatgagtgagtgaactagctcctgtgttctcgtcttttcttcggagagtgacactttggacaggtcatgtttactccatcccctcagcttttcagtaaaacgagcccaccagtgttcatttccttcatataactgctggcatcaagccagcaaccttgtggctcctcagacgcccaccggtgtggcccaggcggtgctgcagcctccctcgctccagccctcaagggaggcctcactgacatcagcctctgcattagtttcttataaggctgacttggtcaagttttacttaaaataacagaaatgcactctttcacatttctggatccgagaagtccaaaatcaaggtgtcacagcagggcgggttccttctcgatgcactgagggagagcctgtgttatatgtaaaatatttgtttagaaacagaatgctcgttccctggtgctgcaaagaaatagcactcaaacataaatttaattctctcagcaaggccatttttactttctgcagaaagggtgctcatcgcagatggaacaatggtgagagtacactcgaacaaaggagggaatcaatttttattccttacacagtttgtccctgctactgtgtcttgtctccattggctggagccagacatgacaatctaaactaaaacccgactggctaacagtttaacaagaagggaaactttggagaggaacttttactttctacagcctgtcccaggcctcctctagcccctggtgtgcttgggcgtgcacctccatctgcacatgtgctctctctctcttctcataaggacagtagtcagattggacgaagggcctaccccactcctgtgtcttaactaattacatctacagcgaccctatttccaaataaggtcacgttctgaggctctggaaaggacatgaatttggggggacactatccaacacagtacagccttcctgcccccctgcaaagtttcgtcttgctctccacccgcccctaacctctgcaccctttctttagctgggggtgggcttctggaatgcagtctcattcgcccactagtctaagtgtggttggtaggtagagggtaggggacacgctgtctgtgccaccgtttcccgccagggacatagacactctcaggatccctgaactctgaagtctaaactgtcagtcagcgtccccagcggaagctgcacttgagaatcacccgggagcttttaaaacacagtgtgccctaaccacactcccaggaactctggtgcacttgggccgggtgggactctggcatgagtattgtttgaaagttcatcaggtgattctaaggtgcagcctaggaccggaacaactgtgtaagatgctgtgaaaacagctccatctcaccttcaccaggaatatgagcagctcactgcctagtgaggctcgaatacccattaggaagagccaagccaggcttcttagggtgggttccctggcaacacttcccaaactctcccaccaagctcccaggaggcaggagggagcaaacacatactctgcagaaccggaaacagatggcagcaagcaccacgtgtccttgaagttttctggttttgcttttaaaattggaatttttgcatcttcttctacaatatcaccatcttgttttacaacctaaaaaaagatttcattatgttgactttttttcctccaaaaatatctgagtgtagaaatgaggctctggaaaggtatgccatgtttaaactgtggttttgtatggtccttgacacaccattgggttccctggggttcctgactttgaaaaacccagccacaaagagttaaagagggtgggagccaatctgtttaacctttggaaggaatcgcatcttagacgaaaacctaggcacagagaagttaagcagctcattcaagatgacacagtttgttattaactgagtcggaactgtacctcaggacccacctttcccactgcattgatctggggcaactgctaatttgctgtgtgaccttgtctagttctctttacttctctgtgtcagttttcctacgcataagatgatgataacatctgatccacccaacttcttcagtagttgaggaggctcaggtgtgtagaggcatgttgaaattagggagtgtcacatgtaaactgtggcatgtcatgtgtaaattatggagtgtcatatgtaaattataaagtgtcacatgtaaaaacaaggcgccgtaatttaagtccagcctcacacttctaggtgaggcacagtgattgcagcaagagtgacttttccagggtcatgcgggcgggccactgagggaaacacagtgtagtgcacccagcccctctgagcccgtgcagaggcttaagggagctccagtgttccagttccagggaaggctgaggctgggagctcatgccagcacttctgtttgctctccattggtcccagcttttatctgcccagtaccagtttgaaaacaaccttcttgtcccaatcctgagagtatcctttcgaaagagtaagtcatggaaaaatgcgtggcaaacaacaacaatgccagcaccttctttctcctttcacaaggccacagagaccctcccccacagcccatctcttccagaggaagtctgcggccagccctgctccagacccctcccttgccagcccaggcccgtgaggctcctcagcccacgtccgcccttttctgtttacactgggagatgagcttctgccgagcttaagtgcagttctggcccttttgtttgtttttaagtcaagttacaactttgctcctggatttattgcaaattccatttatcttcttcttcccggggtctctgcacaaagcctttgtgtcttcctcttctgctgtggacagataccatggggcaccaggaaaggacggggagcacacagccccggggaggcgcactctaaggagggccaaagccattctgcggggtgctggggaggaagacaggggctggcaatgtaggaggaggggctgtcgattacccgggaggacaggcccggccctacatcgtgccccttctcacacaggcctccagaggaaagaagagccaggccgaaaggcaaagaaatcccagacctcaggggaaggaatcaagaaaagaaggttctggtttgagtggaaggagcccgtggcactttctagccaggggtggtatgaggccaaaggttctgagaggcctgagaaaggacacctaggtctgctgagggcggtaggcctgagggttgggcacagcgcgtgccatgagagaccaccccaggtgcagctgggcaccagcacagtctctcagcttccctgcccttctcttaggcctccccaaccctctccaaacaccacatttccagaaactgctgatgaagagcaaacaactccaaactgaagctcaccagggagagaaagagaatcaaactgagctgaacaaattgcgagtggggcgtccagctgtgctgttggcttgtctctctaagaggggaagtgctgagggcctgtcccccaccaccaccccgagtccttccctagtgagagttccctggcttgggagcacgcaggagatgctcggcttcagaggggccttgcttgagcgtggtgaggaagtcccggggctgtgaaagaggaaatgctggactctccctgcctaagggcctgacctagaatggggctttaacctccctggaggaggagagcagctgcaggtagctggcggctgcagagtactcctgggcaggctgtagggccatgggtcagtagctgaaggagccacctttcatgccctcccctcaccatcacagttcccgggcatgaaactcaggcatcagcacctcagcccaggccctcaaggagtggggttaagtgagcatgaacagagcaggccccctttgcctctgggagcctcctggcttcccaacaggtgctatcgctgaatgaagaggagggctgtccacagcagtttccccagccaaggctctgggctccagccctgctggtccctcttcctctgtcacccatcagctctgcagccggcccagatactcccttctccatgctgtggcccctcctccggggcccccacttctcaacctctgcactggtctatctgtcacttacctgcctggctccctcagacacctccagccatctaccctgagaccttggctgctgatgtccactctctggccgcagcttcctcccttcacctgttccttctcctgctgtcaccctggctcttgtgcccccgcctctccctctagaagcttccctgggctcccttgcccgcctgatctcaggcattcagcaccctcactctcaactttactcaggcctgccccgagggcccctcatggccatccactgcattcactccaaaccttcggctgccaggccccagaggaggtgcggctgcaggcccagcacaggctgagtctggctctcccctgaggccactgtcagtggccactgtcactctcctcagatgccccagatccccacctctaccttctacctgcagaatctctcagcacgccccttactgagcaggtccaggccttcccacagggcccctggagtctcctctcacccccctcagagctcactcactcacaccaccacccttccttccctcgagagcagaggatgtccccacctcctttgcaaaactaacttccatacctgggtgcaaatgcaacagctcctgtgtcttccacaccaagtggccgccgtcctcagcctggaccggaagctgtgtggcagcaggatctccagtgcttccagtgcacagccacaagcatggcgtcctcttccttgtcctaaaagggcttcccttagatggctttctctcagcacaccatctctgctcttgtcccccgtatcacacacttctcactgggtcctttcaccttcctcttctccagccctggccatcggctgctactgaaggccattctcagtggcccaggagccaaccccctagctgcctcctcagagtttctgggcttcccacccaccctttgcctcccctccatgggttctcctggtgacttcctgccaggcttccattttctctccatccccgtgctttttacctgctcctctgctggccgggcctcctctcccagcacatcgcttctgtctctctcctccgcgtccacatcttcagccagtgcttccatgagcccccgatttccagctccccagatccccacatttctaccggcctactctgctggccgtctctgcttagacaccctgcagaacttctcacgaaattgaactgatcttctcctccccaaacctctccttgaggctgtttgtctctttctgtatttctaccctccccactgcccaggctcaaaacccagcattctcttcatctctttcttctctgtctccctgcatgtctggtcagcctccggatgcctgaaggagcttctgctctatttttcagatccctcccactccggtgttgctatctgaattcaaaccctttccttctcctccctggaccttacctctcagcctttgggcctcgcttcccgtggtctccctgtccttggacacagagcccatcagagtggcctgtctccctttcagaaacccatatgagctccacatgcatgtggctcccctgccaggaacaggcctccctgtcctcccgtacaacctcactgccgccacttgtcactcagcagatgttgcctgagtccctgccatgtgatatgtacctgtgctcacaccatagccacctgctgctcactcccagaactgaccctctgcacctacccagtcttctggtccctctttttgttcgcctgttttatcttccagagacacctcctgttctttacatccatttccacccatcagcaccttattcaatcgtactcaaggcctacctcctccaaaggtgaaaccaatttctctcctgcctcattttcccttaaaatactgttcattccctattataaccacatctgaatgtatatgtgtgtgtgtgtgtgtgtgtgtgtgtgtgtgtgtgtgtgtgtcatctccctagttgtgtaaccctgcaggccatgaacagttattattcaatgttgtttcctacacatctttaataaaagtttgttgcatttaaatctgatcttattctctcatttcacagttgttagaactgtggccagagtcagccccaggtcagaatgctggtcagcagcagactcacatcccagccctaccttcctgatacctgatgtggtgctcagaaaaacaaggaatcccaggctgttacccagtgtctccatgtgccctccacagatgcactcaactgtcctctcttctgctcttcctcctacaaactgggcaactggaatcagaacagagactttggatgagcatccagtgtaacccagcctagtttttcaccacgacttccagatctacatttaacatccgacagcaactataattctactttctgaacctccagggaagttgcttccttgtccctttcagcaaaggatgtcatggttttacaatgtctccagtgaaaaagttcttcttctctacatcttcctcccactcctacaacccttgatccccacgtgagatctcatttcctccagctgggtcttctgcagagtgattagagcttctgccctccttgcagcatctctattgtaaaaggattgctgaagcttattaagccttgcagctcctaggaggaaaggtaccatatagaaataaaacaaatcaacaaattagtgtgttttgtagaagttgaataggactccacctatctgcatgagtgtgcacactgtgcagtcgcacaggcagtctcaaatgggaatttggaaaaagctaagctttttcacttgagaaaggtttacatattctttgcacctgggcacacacagcacaggctgttctcaggactcccaccagattaggcctgggacatgacagagcctgtcaggtccacgtttgctttccagtctccttgcttccagtctagctgtggcctgactccaagtccagtgtaagatttttttttttcagcaataaggaatcggttcattcacctgtacgaaaaccagtgggaggatcatgcataaggctcatatccttgctgtgaatttcaaaggactggctaagtaaataaaattatcatgccaacctgagctggtatagattgcattgattgctgctaatagccaaaatggacattttaaaagtgctctacactgcattctacacaacttgggacagaaaaatagctgttgctcttaaggagctgatggtctccttcaagggtaagctggaacaggctgacccaggaaaaggcactcccagttgaatgctttcacttgcgtgggaagtccagctgtctcaatggggcccaggagacagactgacgagggacgaattcctgtgtttgggactgggcttgaaaagtctcctgtttgtaacactcaacttgtagaagagcagaaagaatttccagctgtcgacaggatgaggggagccctcctgattctgtctggggatgtgtttgcactccagaatctgctatccttcctcttgctatccttcccggctaccacatgaaacacctggtcctatgggccagctctggaacaagatgactctttgccatcaaggaatacaagtggccaaaggacaaatattgtgtgattccacttacatgaggtacctagaggagtcaaattcacagagacagaaagtagagtggtgattaccagaggttggggtggagagaggggaacggggagttaatgttttatggatacaaagtttctgtttttcaagatgaagaagttgtggagatagataatggtgatggctggacatcagtgagaatgtacttaacacccctaaacagtacagttaaaaatggttacagtgataaattttatgttacgtatatttgaccataaaaaggaaggaaaaaaggaaagaaggaaggaagggagggaaggaaggagggagaggggaagggaggaagggggagggagagagggaggaaggaaatgcaagtgggaactcagccctggtcagagcactgctgggaaaagataggtgactctttatcttgctgtaaagagaggtgtgtttgtgtgtgtgtgtccctgcaggagtgaaaatggacccacaaaccacatggttaatgaggtgagcatactggaccaagctatttaacatctgggcctgccccatgactaatagtccaggtcattctgcataatgcagaccaatataagattgttagtggaggccaggcgtggtggctcacgcctgtaatcccagcactttgggaggccaaggtgggcagatcacctgaggtcaggagttcaagaccagcctgcccaacatggtgaaaccctgtctatactaataatacaaaacaattagccaggcatggtgactcacgcctgtaatcccagctacttgggaggctgagacaggagaattgcttgaacccaggaggtggaggttgcagtgagccaagatcacaccattgcactccagcctgggcaacaatagcaaaactctgtctcaaaaaaaaaaagattgttagtggaagttgttctttttttctttttttttttttgagatggagtctcactctgtcacccaggctggagtgcagtggcacgatctcagctcactgcaagttctgcctcccaggttcatgccattctcctgcctcagcttcctgagtagctgggactacaggagcccaccaccacacccggctagtttttttgtatttttagtagagatggggtttcaccgtgttagccaggatggtctcgatctcctgactttgtgatccacccgccttgacctcccaaagtgctgggattacaggcgtgagccaccctgcctggccagaagttgttccttaaatggctaagagccttcataatattcttgggagggcgagtggcagcccatttctccataacttgctcagaagcacattttagttgttttaagaatgactcgatttttggagtcagagaggttggggctagagtttagggcctgctgttgtgtggccattcagaacgcccaatttaaatctaaatgcgtaaaatcaaaagagtggtgaatgtgaacatgcttttttataaactgtaaagtgcctcactgtgatcctttattctttcaattcagcctatgagtgcaagttagcaatagactttaaagaactcatactgcaggaaagtaagcatagatactaaaatacaaaattcaacctctactgcctatgacacgatttttcaggcctcagaggcagcctggtagcaaccacagctaagaacaaaggtcctaagagctggactttttgaaaaaatagattctgtagcctttgtagggaggagttggtctgagttgaaccatattgctgagaagagtctctcattaagcctttatccattatcaacactggggcataaaatcatttataccaaatacttatttttttaattgagatataattgacataccataaaattcaccctcttaaagtgtacaattccatgatttttagtatattcacaaaattgtgcaattatcaccattatctagttccgaatattttcatcacccccaaaagagtctccatatgcattggcagtcactccccattcctccttcccctttcctctggcaaccactattctactatccatctctatggatttgcttattctggacatttcatataaatggaattatacaatatgtgaccttttgtgtttggcttctttcagtgagcatagtgttttcaaggttcatccatgttgtagcatgtattggaatgtcatttgttttcatagctgaataatattccatggtatggataaaccacattttgtttatctgttcatcagttgatgcacatttgagttgtttccactttctggctaaaatgaataatgctgctatgaacattcatatacagtgtgtgtggacatggattttcaatactcttgggtacatacctaggagtagaaatgctagtcatatgagcaattgacctagctttcttggagtgcactggcatgatctcagctcactgcaacctccgcctcctgggttcaagcgattctcctgcctcagcctcccaagtagctgggactacagctgcatgccaccaggcccagctaatttttgtatttttggtagagatgggatttcaccatgttggccaagatggtctcgatctcttgaccttgtgatccacccgccttggcctcccaaagtgctgggatcatctgtatccttactggtttactgatttttctgactatttgttttattaattcttgagagaggaatgatgaaatgtatatattcaaactatgactgtggttttgtctatttcctctttaacttttgtcagtttttgattcatatattatgaagttctgttagcaggtacagaaacatttagaattgttaaatcttcttaaatttttcttttttttttttgagacggagtctcgctctgtcgcccaggctggagtgcagtggcgtgatatctgctcactgcaagctctgcctcccgggttcacaccattctcctgcttcagcctcccgagtagctgggactacaggcgtccaccacaacgcccagctaattttttgtatttttattagagatggggtttcactgtgttagccaggatggtctcgatgtcctgacctcatgatctgcctgcctcagcctcccaaagtgctgggattacaggcgtgagccactgcacctggcttaaattttcctttttgtcactatgaaattgtctctctttatctctggtgctattccttgtcctaaagtcttctttttttattattaatatagctactccagctctcttgtgataagcattgcacagcatatcttttttcattcttttacttttaaactatttgtgtttttatatttaaaatgaatttcttgctttttaaatccagtctgatagtgcctgacctttaattggggtatttggaccatttgcatttaattacaagtacatgtaacatacatgtttggtttaggtatgtcatcttactatttgttttctactcattccatctgttctttgttaccttttgcatctttccttgccttcttttgaagtgagggttcttttttgttatttcattttatctagaccattgacttttagctacatgctcttgtcctttgtgctattgctgctataaattttatttctgcatatgttatgaactctacagtactttattatttttgctttaatattttaaagaaatttttaatgaaaaattttaatatttatcctcatgtttcccatttctggtgctcttcattcttttgtgtagatccaagtattattttccttctttgtaaaaaacttatgttaacatttctttagggtagatctgctgatggtgaattgtctaagctttcatttatctcaaaaagtcttcattatatcgctggatacagaatttgatttgtgtatcattcagtatatcaaagaaagtattccattgtcttctggcttgcattgttttgatcagaagtctgcagtatttcctatactctctatgacactataaaatacagcttttttcagactacttttaagattttctctttattactaattttagtaatttattatgatgtactttggtatgatggtgtgatttcccttgcttattttgattggggttcattgtgattcctggatctgtggtatttatagtttttaacaaatttggaaaattttcagccttgatttttgtcaaaaatttgttctccctcttttttctttttcaattatacatatgttagaccacttgatattgctcaaggattgatgggactttgttcatttctgggttttttgttttgttttgttttgtttttgaagtcttcttcctcttggtgcttcattttggatagttcctattgctgttttcagttttacttttctccttgtagcatctagtttgctttgaatttcagccactgacctttcatttcagatattgtcttttccaccacaagaagtgcattctttcctcattttatgtatgtttttcttaaaatcctggagtatattttgcctacttaaacagctgttttaacgtgcctgtctgttcattctgtcttttcaactctgtcattttcaggcatgtttctattaattgccttttttcctgatatgggtcacatttttctgctacctggtgagtctagtaatttttgcttagatgttggatattttaaaggttacattgttgaatgtttgtatatttttaaatcctcctttaaggagtattgagtttttatccagcaggcagttacttatggataagattattcctttagaggcttgtttttagctttgttagaatgaacctaacgtttcttttattctagggatagttcagtcttactatctgcatatgaacctcattggatctctactaaatgccccagctgatcaagctggttgatatttttacatctcagaatcccatgtgaactctgaaattttcagcttatagcttctggtcattctttgcccagacttacaaagcttcactctgggtatgaacatcttagtattaagcactcaacagggcacttgtgcagatttctggagctttttttacatggtcccctcttttctagaattctgccccacagtttccaactacagtctccttgaccttcatttctgtattttaacttaacaagactaccatactgtgcttgggatattgtttcccctgctgtaaagtccagaatgtgcctccaatcagaaactgtcatgatcatttaccacatgtattttctttatctcatgggtcatagttctgcactgtgtgttgtacaatatctgaagccgtcagtacatttattttgttgttttctagttttggtagagacagggtttcaccatgttggccaggccaacctctatatttttcatccaggcctgcggggtcatcctctttggcttcaaatcccaagggatacagggggagggtaaatctggatcctgttgctttgtcatggccagaagcaaaaatcttaagaacaggttttgataaagaaatgatgaatgatagcaggcaggcccagaaactagacctgataacctggctgggggttccaagatataaggaagcagcagaaaaactctagcatctgcaagccatgcaggaacaggtatggcaatggagacagaggcaaaaaattttggaaattactacaaacaaatctcatctgtgttcccaggtggctggctatcttacatttgctctccagattcactcgccaccctttggcctgtcaacctgtctagattgcatcaatggggcaccattgacctctagtttctagttgtgctcaggcaaaaagagacacaaacaggaaactacaagacagaaaggatgtttattcccctagatcctttcctgtcaaatcactgtgaattagttttgcccctctaccaaaagttgcactgtcaccatcctattgggaggccctctccttacaggtactctctgtggattctcctaactattccttcctcttgaccctttggatttagggagggtaatgcctcttcaatgtgattaagcttaaagtattgcaccttcctttgttagttcccctaaatcctgtccatagcttgataaataatcccttcattaaattctcctctttttccccaccagaattctaactgatactacagggttgttgatgctgcctctaaatgtaaaccatctactgcccagtaattgtaagaccataggcagatcactttactgactctagcctcagtttgcccttagcctagccctgacaacttgagcctagccctgactacttgagaaactcaaattcaggaggctgtaccataacagcagacctgaggaaagaagtgccccctccaccttccctacctttttttttcttttgtcccccattcttagaattcctagctcagctgctctgcttcacaggctaacccaagtcttttcctctaggtcttagccacagatatagcctggtcagtgctaagagaggaggaggccagataaagaccactcacgtagagacaactatcatttggggatcatgctcaaggtcaagttcacacaagcaactcagcttttaaccctagccagtagggcttaacacacaagggactcttttccctcctgacacatgctccctggagaagatttatttttttattttttaactagaaagacaaatcaatagaatgagtaaattaaaaagttaaaaggctgggcgtggtggctcacgcctgtaatcccagcactttgggaggctgaggtgggtggatcacgaggtccagagatcgagaccatcctcgctaacacggtgaaaccccatctctactaaaaatacaaaaaaattatccaggcgcctgtagtcccagctactcaggaggctgaggcaggagaatggcgtgaacctgggaggtggagcttgcagtgagtgagatcgcaccactgcattccagcctgggtgacagagtgagactccatctcaaaaaaaaaaagaaaaaaaaaagttaaaagatagagattttaaataaagaaggaaaagtcatgagttttaaaaggttagtcctaaggtcaaggaagcaagttagacagagtcatttactgcagcctcccccaggctgaagcacatttagaaatggaaaccaaaggtatggtggaaggaatccatgagcaggaggagtcaaagagttggtgacagtctactctgaaagacattaggccacaacgaacatataacctctcaggcaaacatccccagatccctgtcctaagaaagggaaaatgaaatggtctcccacctttctgtgaaaacccattaaacgtacttgccttcctgaggaggttattttctgcatagtgcaccttttctgtcttctccttaatcaaagggacacttaagtccccttttgaggcttctaatgtggcaagcctattcagtctccaaggttgatgtttttcctagactttcacttgatccttgccccaaatataatgtacctttcccctacccatgttgtgactcagtaccaaagcctccagggccactaccccggggttagcctctctctctctccctttccttccaggagtctttccaagatctgaggtaagattgatgcttctctgggaatcagacctccttacccttcctcttgcataggcttaaacatgatattgcatctttcttttagagaaaaagtctatattttcttgttatttattatcattaaaggcaatacaggcttacccaagaactaggcaggttattggactggatctacccaggagtccagagattcccaagtgagtcagcagacgcctgagatagtaggggcctaagaatagcaaccttccctacagcctctgcgtgaccccttctgacctgtccccaccatgggtagctgttgtaatctgactcactgtgtccctccagacagctctggtttctgataagaaccttccatgaaagaagagccttgctcacttctgcactagctgctcacattattggttcaaggcttagagagtatagtcctttgacccctaacccttgatcctggccccagtgaactattcctactgggcataggaagaaatgcctatacctgacattttttactgaagggagagcagagacaatctacccaatgatttgctattgttaattaataccccaaatccctaagtaggagtgactgaaaggcttaaggccctttaactcttcctattctcaagtgaatctaaagtttattttccctatatcctttaatcatgtttcaggtcctcacctgtctgtccacagcctgaatacaattggtctgggatgggatttggaaaaagcagacacaatgccttgtagttgatgagtggcagctcgggagtttctgtaaaggagaacctatggatggaatattggctgatacaggagccagggggttttcatcaggctgttttgtatagtaaacactctatttttccacttagattgcatgtttatttacttagaaagactttaggggaagccaatggagactggaggggacggggcaaggccctcccaaaccactccttggcaatccctgcctaagatggcttaacccctcattggattctctcacttctcacttatttttccttcctttatcattcattcaatcctgggaataccacgcttattgtttcattcatccatccacccacctgtccatgcatccatccatccattcatgatggcagctccttctcaatggaaagcaaaagccccttgccagagagaacctctatatttttcatccaggcctgtggggtcatcctctttggcttcaaatgccaagtgatgcccaagggtgctgatggtgtcactgcacttctccacagccacctttcttctcttgccattctctcccactcctttctcctctactcttaagttccttttttctctccttttcctttctccactgtctatgctttaggcctacccaagccactgtggatattttgtagccattcaaaactaaaaagggcagctgagcccaattccagaagagttgatagctcctggctcctggatcctccatgacttcagctacccgctgtttccctggggcagagctaagctggacttctccttactggcccccagggtctgggctaaggccacattggggccccaaggacatcaagtcttcaggctggagctttctcctacgggagaaaaaaataagctcccaaagcagaaaaagttgtcttttctcctgttgctattggaaacataacaacaaagccaagatgtagtggcttagcaagaataaaacaagctgtcagcagccagggcccagctgatctcctcagtggtgacgtgggttctgtgcacagtgacaatgagtgtaattgaacccagagctttggggtgcaggaggcaggccaagcagccccaacgccactcccctttcccatgtcactcatgcctctggttgggggtggcagatgggtcagcacaggcccacagagggttcctcttcatgtctttacttctctcctaaagagggataagcctggaacctgggcacctggaatgactgggcaagcatgcctctaacctggcctccattcctgagctccagttaccctgttaccatccagccccatctgttctagagtcactgcctttaggctggagggaccttggcaatcgtctggtcctggctgtctcaggagcagaatcctcacttgggattagacccttcacagacgccagatgctctaagtacaggggcatcatggaggaggagccattctgacttccagtatacttgatgaggaacaactgattcagtcaacccatatcatcttgggtcaggattggtgctgattcattttgattcctgcaggcatggtctctctcctcctgaagctgagtctagtggggaagacaaatatggatcaagtaattaaagcgggaggctgtttaccaaaagggagttcttaggaggtcacaagtctaggaagagggtggtcacggaaggcctttctgaggtgatggcatttaaattaaaggcaagagtgcatttctgtcactcacttcctcacccccagagcctaacacagggctggcacatggtagatactcagttgtttcatgaatgaatgaatgaatgggcaatgaacaaatatctctacatttcctgatagcccttggtgacttacaggatttgatgctgggtctattaatgtatccatttacaaaaaaaaaaaaaaaaaaaactggatgtcacgattcctcctgagggctatttgtgttatggacgtgctatgtgctgttcattcaattttagaggtgtttatgctgggtcacagctggggaaaacgatacccctgagatcccgcagggagtcttctagactcgccccctcctgacaccctcagactgcaccatggagaactctgtaaattaattcatcaaagtgaggaaggcaggccccttgacaggtgactggattcagatctgaaagcggagacaggttaatacttcctgtgcccagatgtcctaaccacagacccaagctcacgggaggcaaggggagaatagcaccacggacctaccttctttttctcataagagggtgaagggttcttggaaattcccctaaagcattcaaatgagcaaatccagggctgtttgctgtcaggtttctgggcaggattatgggcagactgaccagctgttccctcccccaggactgccttaatttccaagccctacttctcagtcccagggaaagttggcccagctataaaatgccctgaaactctcccagaactcaaaacatacccacagtacggtgtcactcttggggaacctgtccgtaatgaacagcaacaagcatcttctttcccttccctctccaacacgcacctttccaagaagagaaatgagagctagtgacattgagtataggcaaggccaccacatatagtttcacaggctgttcactgcaaaaggccaacatgcatagaaggcagatgggggctgaaattcagcctgcactcatcctgccaagctgtgccctggcatggctgtatccacaaagaggaaggggtgccttttctaacttgtacataggtgccatatgggctagtagtgaccctgggtggagagcccaaagagtgacatctggggaggaaaataagccaatcattcccttgctaccacctaaacattctagccaggtgttcctcaagtgatcagatatgctaataaggcagacttcttagaaggtaatagaatatgatggataaaccagtagggccggtaaggctttgtgttttatttttctatgtcttgaattcacatgacagtgaaaatcaaactactgagatgtactagggaaagatcaaatgtcttctttctgttaaactgcttttagggagagtaaagatttgcagtgagtataacccctctgggttggaaacaccaggagtctggaatgtagcccaaacactgggctctagctttgcttaccttgagccttttggtcaggaagggggcctctgaaagacgaggggaagtcggcattttctcaagagaacaacctcccctgtggaggtccaggcatctcaccagagaacacatctcatactcaggatgattagctcttggtttcgtctgaatggtggcataatatggatgtgttgcttagaaaagaatctgatttcagcacatgtttgatgggtgtagaaccaagggctgtggtcccctttgccgatcactttacattgtggggatatttggaaaaggcaactcatacttaggggcaagggcagtcaccccctctcagaaatacgtccccagcatgatatcctttgttatctgcccatatgcccagtctaaagggggctatggttctggggaagctaagagggaaggtgggcagggagtgaggcctgccaatcacagctctcctagcacttccgggccctcgatatgccagagcatgaagtggggtcaagggatggaactgaaatgcttcctgagactctgggatccccctaaccgcagttccctaccctcataattccaaatcctctgtggctcttggaccaggcaattacctgggaaccacctctggactggccagagggaagcccaagcttctcctaagtttcaggaagagaagcctaggttctcggtgctgttgaaactcagcgcatgcgtgggcagttcaggaaagtcagaccaatgtcatatgactcctgcgcgatcctctcaggaaacagggccccaggcaatttcgttcctaagtgagacttcttccctcatcatcccttttgttttttctaagcaaaagttacttggaccttgcagataatttcatatccagagccctcccatgcctcgtgggagtacataggataggagccggtggttccgaagcgcctgcaggtgccacacatggagctaaggggtcactttgccaggaggatcttatgaaatcctcagacaaccctgagatgaagaactgttactgttcttatttttactgataagatgctaaaggttcagagagtttaagtagcttgcacgaggtcacacagccaataagtggtggagctgggacctggactagtcccagccctagtgcccacactcataccaccttatagcatgggaattccaggtctttcacaaagttggaagactgggatataatgaggagggaaggccatagctcccctacacccatggtcagccaagctctgcccatgtcgtgagatgtgtatcggagctacaactcctccaggcattttacctgagagcagggactctgtctcccttgaacttttctgcatacgctgtgcctcaagccaggcctgattcacaaaataatgtttattggcagaatgaaggaccgcctcccaagctgccctcatcctgcttttctcctccctctctcctaagctctgagtagacactgggctcgccaggctttctatttttatttattttttatgaaacagggtctcactctgttgcccaggctgtagtgcagtggtgcaaacatagctcactgcagcctcgacctcccagacccaagccatcctccctctttggcctcccgagtagctgggcccacagaaggcagggttcctgcacaggcaccaggttctactcaagctgacctatgttcccacttctgaccctagcatgttaaacatccatgtccctagatgggcagatgggggaggtcttgaacatgtgtccttcctacaatgggttctcagctgctcctggtatctctatgaatgggttctgaaggttttctctcatccacacagttttagctcttctttgggtttccagggctgccccgcaagaagcaaatctaagcaggaggttagcaactgcgttcttggccctggtctccttcccctgagtggccacagtgtgggtgaggttcagactcccccatggtgtggctggctcctgggtgggcccaaatagcatgttcatcagttatcaaatgtcaaagatcagaagccaagccatataaacacctcaagatgctgttccagcagttatcccccgtatttatccactggaacagcttgacaaatctgtcagtgctaaggagggtaggaatcaaatcatataggtccctatcttcaaggtgtccaccatcgggctgaggaggcttatatacatggcacagttagtgagcagtgcaaggtttgtgtggtgcagtgtgccaggcacagctcagaaagcagggatggtgttggtgggatgcaggggcaaaaaatcctgataaataaagcctttcaaagtagctgagctatcaggaggtcctctcctatcttccataccccatctagcatttcattcctcttgaactacctactgctacacaacagacactctaaaacttagtgtctcaaaacaatgcatttttatctctcacatctctgttgactgggctcagctcactcaggatgtcttgcagttggaacggctagggctgaaatcatctgaaggttctactgagctggacatccaaggtcaccatcactcactcacatggctggcagtgatgctgaatgttggctgagagctcagctggggctcttgactgcagcaactatttctggcctcactctgtggcttggacttctcacaggatggtggctgatttctagagcaagtgtcccatattgaaggttctaagagatccaggcagatattgcaaagcttcttacaaccaagccttggaagttccagaatgttgctcctagcatattctgttggtcaagcaagtcactataggtagaccagatttaagaggtgagaagcagctcatgaatctgaggagggaaagaactaaaggctgccatcttggagactgtctattacagcttcctttatataaagataacatgcctttgttgaaccgagacagaaaatgaactctcaactgggaaaggaaaaagaatctgtccctgtgtctagaagaaggtacttcttcaagtcccaccccagcctgttttcttacctcataccccaaggtacattctttgactatgtcctaggcccagaattctggagtcagaatgcggaagagagtggaaaaaaccacttacatcatcctaactaaccagcccacatttaagaatgagattgctacgtgactgttgccatgaaattgtttatctgcccttgctgcagtgtggcctttaagggacacaatctggtgccaatgatgtcccagcagcagttgccatggagacctggaggtcaaggttggtaagggagcttcttgccaagatgatgtcacataaaaatccctttgctttcttgtgaccaccaggttattcagctatgaaggaaaaagaaagccataaattcctcagatgtgtgtccacagttggagcagggtgggctactgcagactcctagcatacaagtcacgagacctcctttgagtccttgcactccccctgacttgtctgatgggggagatccatctaacctcactggacatgctccaggagccgcgtttggaaggctgtgaaatcatctggttgggactgcctttctcacccatctgaataattcaagcacaataactcacttctaagcctgccgttggcttcccacagcctctgtctgccagtccccattacctatggggtgcaatcactgtccatataaagcagaactggggtactttgcacatgccacctccccccaactcactcctagtctaccctacttcagaaaccttatctccttccccaacaacacaatgtatttaaatagctactaatttcctcttctttctttcttctgcataaaatttcattaattatacatttcttggttcatgacacaatgtcatctttgtaccatgcacacttcacttgtatttagctattcagttatttttttttaaataaacaccatccagtcagcccacaacccaaaacaaaagccaggcccttgacgacaaccagtatgtcttccaaattccaagtgacagtgaacagaaaaatgaaagagccgttcacccagcataaacaaggcggaagaagcccacgcctatcaaaagtttccatcttctagcatccgaagatggcgcatcttccaaatgtcttggtttttacatgacccaagtgtcccagtctttccagtcattgaaaatttgggttctcaagtggtgtatcattttatcttgagctgtgtgtcctatagaaacatggaagatgactatttcttttttcggctaaacatgcagcagccagcagactagagccagcttctgcctcgggccgccccggggcgcgggatgggaaggggttaacgcagcgccccgcttacctggggtaaaagccggcacagaacccgagcgcacaggtcgccgcgcgcatgcgcactctcctggcccagcacagtgcttgggggccggcggctcccagctcccgggccgccctgctgcacaaaggcctgctttgttctctcggctctgttttaaatatctgacgaatattccccccatccctgctccaaatccccggcctgacggcaggcgcggcacaacggcgcattgtggggccaagcgaggggcgaagggggctgggggtggccggcgcgatggggacgctccggttgcgccaagttgactctgccgtttgggtcacctgggctgagtcgcgggcgtggaggcagagggtagggggtgaggaggtgtttcttgtcttcttcttccaatctcagaagtaaacattggaaagtggggcccccagcagtgtacagcccgtttccaaaccaggcctgtaaggaggagctgaggtttcggctgagcccccagcctcccccgaccgcacagcctcgggcatgaacccgcgaagccagacgcttagttgcttatcaggccatcgctgtacatatttagaaagtacctatcactcagacactttgaaaagcgtggcgttccagcgcaaaccaacccgaacgggttggaagggggcagtcctttcttcccgcaagttcggggctcgagagacggctgcaggaaggccatcacccctggcttcctgcagccacagcttccagccccacacgatgcccaacttcattttagcagtggcccccaggggaaatcacaccattcttggttttgtccctccctcctgaggttgggacattgttcaaacaaaagtaagccttcagctgacagagaagctgccccgcctcttccctgcccttgtcttgctggcattcattgggactaccaggtagctttccttcccagctcaggtgtttacctgctgctgcagaggaggagtttttgcattgtctccagggggtttgcaaaataagaaccccaaaacccacctctctttcccattttcttctttaaaggtagagaaagcactgcatttcacattgggtcttggaaacccaaagctagacacaaaatgtgggcgttagcagctctgaaaagtgtgtgcttggtcttaacgtttattcttaaaaaggaggtgttcataccccagcttgcgaacaaagctttcataccctcagcatcttgaagggaaattgctgcccttccatccagggcaggtgaaggaggaactggcttgggagggttggattcagaagcaaatagctttatcgttttgtgatgcctgtttgaggcctgactgggagcccaggagtcctccttctgtggtagtttgttataaatcccagggtcggacttacattccccagctgcaaaaagcatacatacgtcctaagatatttatttttaatcatactttataattttcacatttcacatattgttacatttcaccaatactctaatacttgagtattaaagctaatccaccatagaccaacagtctaactttgcaaatgaaggaacttgtccagagccattcagaaagacagggcagaggcgagcctggaggccaagcctcctgtccctatgaccaggtttggtcccttctaacatgctagtcatgaactaaaagaccaggtttcctaccacttctcacaaaattcttatcacgtcagggaggattctgactccacagtaagaagctttggaaaaaggtttttggtattcaggtagctttgaggagagggagtctcttctcagtacagcccctaggaatgccgagtttgccaggactgtgctcacaagcttagagacgtaagtcacgttccattgcctgggttgctaagtggcagagaaatcctgggtgtttgtttccaggcactcttgagcctccggaggaatttcttcaagcaacactaactgtcctttcaccactctgttggccagtgaaccccctatctctgtagatgacagcagcccgctctttctcccccactagtccccctgcagcaggtcagcctggagccacatctgggaaggtgtgacctagaacttgacctccttccctgatgagtatgcagaatctccccagctataaaatagcatggccgtccctaccccaccccccatgcacctccggacttggagacattggaaggtttacttcagcacatttgtgatgcgatactagctgcttggagagaaaccttcaccagcagcctcatcctatagcagtgcctgcccatctgggcaggaggtgccagggtttatactcccctgagcttcagagggtgggatcgttccagacaaccttcggccggtaacttctacgggcacatcctttttttcgtatgttctacattgacccataccaccaccaccattccaaccccttgaaccaacccctggtttcaagctctcccaggctggcagatgaaggaacatttcaaagccatcacgtggtaatactgcctgctggccaacaactccatttcaacagcgtcacctttggactgttcagcagtgtttgtgcaagtatttgaatattttctggcattttggccctattattttataataataagtggaaatggaaaaatgaagtgctgattctcatgataagaagggcaggtctcacagagctcatataattgaggcaaagatggaaatcattaggcacgctgaaagtgggattatgtagcctcaatcaaatgctcactggagttaagcctgtcaactatgtgtccaattgttaaaaaaaaatgaatacaattagggagcatatatgaaattctggacgtatatggtcaaagactgtgtctaaaaggcgggtgtagttgggatatactggattccctcaattctaaagctgcattgatttaatagcagttttccaggactgggttgggaagacactgtgagaccagaaatcaggaaaatacagtgataatattgtttcacttcctgggaacagaaccgtccctcataacatgcaagtgtactgcttgcccctggcatggtggaccagagggttttcaggacagtattagggtatgggaggagggagtggcctggagattgatcccttggggagtcactacagctcggaagccggggacaggcctttagttaatgtgctagaatggatggaacttgactcaagagaggccctcatgccacaaggttttgaatctcccatgtgcccggcatatagaaaatttagggagttaaaagcaaagagtataaggtgcaccttttcctctttgggcactcgtccctttaccactgtcccagctctccctgggggccatgctgtcactggcagcctttgcacggtctgttccctctgctgggagtgtctgtcctacctccttggctgcctggccagctctggctcacccttgaagacgccgctcaggctcctgcctccccaggctccagtgtctgtgtgtgcgctgcgtgctggccatccacctcatattcttgctctgtccacactgtataaccatcactggctggcctgggagagtttgaagatgagatttcttgttcatctttcgatcctctgcatcccaggagccctcagtgagggtttactgagtgaagcaggccaggaaggaatgctgcgttctcaggaagacctcttcagcaaaacactgttgacctttgcctttgcatcatgcgccaggcatgacctagcacagccattttaaacctctgagacaccaagaaactctttctttcttctccagaagccaaaccatttgtttctaaattccgctttctttgcctccgaggccccctcatctggagccttcttgcccatctagtgtctggagcttcacatcctccgggaggttctttactgatactttcagtaagtaaagccactgacttttccttcagctgtggggtgctcgctgaattcttaccacttcttcagggaaaaacaacctagaagcactctctgatccaaagtgtttctcagggagagcggccaagtgagcacaggagccgctcggccgtctgggactgtgatgtgatgtctgaacagcctctttagaaacactgcagccttttccagggatgccatccagacggggacatccctcacaagttgtctagggtcctggggatggaggccgggagctccggatcgagggatttagccttatggggcctggttggccccgccaggccagctgtgaatgaggagggtgtctgagctctgttttgcacccgtccactcaccaacttattcttgacctaacacaccatgcccctgctgcccttggctgtgacgatgggaagcaactgtccaaaaagcctgaggggagccagctccaacaaacccaccgttggcccaccatgcccaccctactcagcgcaatgaccagtgggtctttatgttttacagtcagggccttgctctgttgcccaggctggagtgcagtggtacgatcacagctcactgcagccttgaccacccaggctcaagtgatcctcccaccccagcctcctgagtagctggtactgtaagcacacaccaccatgcccagctaattttttcttttttctttttctttttctttttttttttttttttttttttttttttttggagagaggggttctcaccatcttgcccaggctggtcttgaacacatgggctcaagtgatcctcctgtcttggcctcccaaagtgctgaagtgctgggattataggcatgagccaccacacccagccctgggcctctttttgaggacaccaatgccattgcctcctggctaaactgctctccacacaagttagttccacagactctccaggtccttgggaccccatgaaactctctggggctgtgcccagagtccacttgacagaaacctgattcttttcctgtgaggcaaacagctgtgatcgggacatgtctgtcaggggatgacttggcagagctacaacgccaaggctcggatgcatattttttatgtgatttcttaaaattcaagcaggagaatacgccttcccccaaacggctggctcccccactgcattcgcattccccccacgatgtataacaggagtccgcagcccacccctggagaggacaaggctgtaattcagcaaggctccagtgacatcctgaccgtgagagtgcagctggggcagtttatgaacagtgctctagtccctgggggaagttagctctgttctccagcccacaagagtctattgttcgctttcttgtttttctccaaatgtttagatgtgctcagagcacagaaaagcccgaaacccaggccaccagccagggcgatcctgaagcagggaagcctgtgggctggagctcgtggggctacccccacccacacacacccattgttgttcctacctcgccctaagatgtgaccgtcctggaggacagaggtaagggagtggcctctttttggccagggctgtttggacaacagtgggcttggattgttccagcaagtgaggtatgagaccacagctcaggctcacttgggtggtagccagaagcaactgcccaagttaccttgggcccatccaaaatgtgcacagagagagtttggcaactgtcttccagttgcttgtcactgaccaagactgctgaagtttgacaggaataagcaagttctggcctcctgtctgcatcaagaatctgggctccaaggtacagcctcttgagttggactcctgccatcagctcttcctaactgtgcaaacttgggcaagttacttagcctctctgagcctcagtttcctcctgggtaaaatggcacctacctcgtagagttactgaggattcaacaaggtaatcaaggtaagcactcgcacagaatgagccctcaatacatactggttattctttgtattattactgttatcaatgattactagtacaccatcccaaagtcacctcctctgcttagagcatccatttttgtacctaaaccgaatgccttcaacagtctccagttgtgggtcagagaacagctgtgcaagaacggcaatgccagaggaatgaaggatgaagtgccttgtgatgtggggaggagagaacgtgctcaaaagcccgtcgcctttgcctcccactccccttagccccagatccctttctccagggctcatattacctgccctcccccagtggctgggattctcagcctgccactggctccacagtccctacagagccaccgaaaccctcccacccctgcctggaaaatgcctctcccccgtataccaccttggcggccaccactagtcagccagtaatggggtgggggtgagacggaggtggagcctctggaaatggtgctagatcaagggagaaggagatccaggaccccaactccgtaggcctgggatgctgagtacagtttagagattggggattcatttacaccagcttggggggctttggtgtgaagggagatggacagagtatgagggaggaggaaaaggtagagggtagaggaatgcatcctgaatcctagtcctttctgactgggacagttcacatccataaacgaggctctggggcctgcctcaagaaatggaactatgatgatccccctttggatgcattaatcctttcaaaaataagactctgggagcctccggtgacagggccatatggtttccttatcttccttatcttccagcactcaccttccatttggaatgtttatcccaagataatgatcagattccacttagggtgattgaatgggggcctctgagtatccccccctcaatttcaaatgaatgggtgatccgatccaataatagatgagcctaacagtctcctgctaatggatggggctcctcagccccatgccatgcacccccaacttccttttcctgcaaatatccacccccttcaacctgggcaactccacttttacctgctttatatagtggagggtgctctgtgtaaaatttctagtgagccaaatggaactgctttaaactatgtttaaaaaccagagatgtgatgctaactcagcgattttcaatagaaatgtaatgcaagccacaaatgcaagctacacgtgtcattttaaattttctgatagccacacatctgtaaaaataaacagatgaaattaattttaaggatatattttatttgaaatctaatttatatcatagttatttaatataattaatatatactatattttattaaaccccaaaatattttaacttgttaccaatataaaaattatttgtgaggtatttcaccttcacttctttgtacttagtcttcaatatccagagtatatattgattctgactagccacatttcaaatgctcagttgcccctgggctagtggctattgtattagatagggcagatctagacagaccacactaagaacctagggcaaggacaaactctgatgggcatagttgagctggctgctagagagagaccctttgagaagaagagcaatttacaactttgctctgagtctaagtggagatctagccatcatcttgctacctctccttgcctttcccctcccagggaggaaaacacataggacacagcatttttttttttaagtgatagcagttttaattgctactaatttaatggcagtcatttcacctgctaataaaattgtccattgaggcctccagccgtgagtgcttttttccatggactgtttaaaagtgaagctaatgctgattgtcaccaaacatccatgtcatggatccactgtactttgtctgaagaaggggaggcccgactggggtagacagagtcagctttgggtgatcactgccagtagacaccctctgattccagagaacaggagacacaattcagcctttgacaggacattcagataagtgttcactagtcaatcggataccatatttaaggctgggcgtggtggctcacacgtgtcatctcaacacatagggaggctgaggtgggtggatcatttgaggtcaggagttcgagaccagcctggccaacatggtgaaaccacgtctctactaaaaatacaaaaattagctgggcatggtggcaggcacctgtagtcccggctactcggaaggctgaggcagaagaatcgcttgaacccaggaggcggaggttgcagtgagcggagattgtgccactgcactccagcctgggcaacagagtgagactcagtctcaaaaaaaaaaaaaaaaaaaaaaatccatatttaaatggccattcatgttctggaccaggcattggaaaagaacagagtttgtgttcggaggtttgtatatgtgcttgatgtctcccagtcctagtgagtcttgaatgagttaataatgtaacaggtctcctgctgaagcagacatgcccagcgcctccctgatcttcaaatcaagataaacacatacaagagcaggctgggaggggagtcctctggcaaagcaggaggacggcggccccaagcaagccctgcatgagggaaggtggggaagtagattccaggcctcttgggagagcccttcgttgaccaccttgtggaatagttgctctctagcccctgtctctgctttgattttcttcagagcacttataattcttgacattctattttgtttttatttgttgattgctgtcctcagctttgtttcttgctacttccccagtgcctagaaagagtgcccgtcactcttaacaaactttttttttcagacagggtcttgctccattgctcaggctagagtgcagtggtgcaatcatagctcactgcagcctcaaactcccggcttcaagtgatcctcccacctcagcctccagagtagctgggactataaccatggccatcacacctggctaattttttaattttgtgtagagatgggctcttgctatgttgtccaggctggtcttgaactcctggcctcaagcgatcctcccactttagcctctcaaatttccgggattgcaagcatgagccacctcactcggacttcgtaaacatttgctgactgaataaatagtatgaggagtttgttccagccatcctgggcaggcctgaaagatctctgagcttagaaacagccagaggatgagaacaagctggtaggagaggcagagcgagatggtggtctttgtatgtgattcccctagtaatggggagacggagaagaatttgcagaagtgagggaatgtgattgcagcacaaaggcagcaagattattttgtcagcaacatttggatcccattggtgatgagagacatgtgggcccggcaaggagacaattgtggtagtcaagacaggatgtgaataagacataaagaagcgtttcatcagtggggatggaaaagaaccagggctgtggcggccgagttcaggagtaggaagggtcggtcaggcgttcatgaggacctcttcacatacacacacacacaaacacacacacttgcacacacaggcagcctgctgggaccattcatttagaggcccccacagcacattttagcacaactgcaaacctcaccttctgcctcaggctttggtctttgtcttctctttgcttcttaccatagctgggaacattgccctgtgaagggcagggcccagaaactttggaggaggcagtttcttcagtcacagcttttctcctggctagtttgcagaggtaagaggcctcaaagtcacaatgtccctcgggagagaaaggagagaaggccagtgaaggaaggcctggaagaggagagaaatccttttttgaactgggtcaaggagggcaactgtgagctgacatcctaactcacacattcacacatgtgtaggccacgtgaagggtctgtaattgagactgggggactggaggaggcgaatgagcttcttattaggagtgggtggggaccttcttggggatccagctgaaacagaactttatttttaaagagctttagattgatgtccctgctagcctaaatataactgagcagccagcttcttgcgagccaggccaggcttccaagcaagctccaagaccctctttttaagagagggaaaaaaagagagagggagaggaatccacagatggaaaaggtcacacagttagccctctgaatgtgctgggaggagggagatggatgagctggttgtgtacactctgcagtcccctggcctcaccatcaaggaagaaagatcaagggttgctgggtgatgggggaggggagctggcatccactttgtacctgggatctgcctggcccagtcggggacaagtaagacccaggcttgtgctcagagagctgacggtccagtgggaggaaaagggtgccgagcaaacctgcgcagcactgcagtgcagcgcaactgatcagtcccacgtgacgcacaagcagagggctgtgagctttcagaggggccattccatgtggctgggggacctgaacagcccatctcagagaaggaagggtttcatatggagctggagagaaaacaacaggaagcagagacaggagtggacaggatgcacgtcgggtactcaaactcatcagatttgacagaagtgcaagaatgtgagagcaagggggttggtgcttggagcctgagatattgtccttcagtctggaggtaaaggggaggcactgaagagttgagggggaaggcagcaaccccacgtagactgaaggaaggctaacttggcaatgaggtgtagggtggagcttccttgggggaggggagagcccaagaacacaaaggtcagcaaggggtctgagttaggtaaggcgatgctagctgctgtaacagactccagaatctcagctgtgtaaaacaatagagatttgtttcttgctcacataaagctaatttggtagagggctgaggtgtagggctttgcttctggagtaattcaagaatcctgagtgaggggggctctgctgtcttcaacatgtggctccacggtcagcctggaattgacattcatgttgcccaggagaatatggaagacctggcaggaggcttttatgagccaggcattccaccggccagaactcaagtcacctggcccctcctgcatgcaagggtggctgatgggtagtccctggtgggctacacatatctggtggtcacctctgccacaggacagggacagggactgtgatctgaaggaatatgtcagcaataggaatgaaaagggaggaagcaggcagagcgtctatatttaggaattaggaggaagagaagccagagatccaaagcaaaataaggcagcttgagggaacagagagaaaaagacagcactgcagacactttgaggaggagtgtgctgagacagaaccttcggtttggctgccataaggcctgtgggagaggtgggcagagccagggttttgttttgttttttttgttgttttgttttttgttttttgtttttttgagtcagagtctcgctttgttgtccaggccggagtgcagtggcgcaatctcggctcactgctgcctccatctcctgggttcacacaattctcctgagtagctgggattacaggcctgctgagtagctgggattacaggcgtgcaccaccacacccagctaatttttgtatttttagtggagatggggtttcaccacgttggccaggctggtctggatctcctgacctcaagtgatccacccacctcagcctcccaaagtactgggattataggagtaagccaccatgcccggcccaggttttaaggctttgggaagcagccagcaatgattccctaatactttccgtaagcacatccatgcattaggcatgtgtgatgacattagctttacctccaaacacccaaagtggccccagaaggcacccctttccagggactctctgtggtgcagcaatgtgaatatgggctttagagtcagaagatctggaatccaggaataaccatgtcaacctacggcaaacaccttaatctctgggagccttggtttcctcatctattaaatgggcagactggtagctacttttccatctcattgaaagggttaggagtaatccacttcgtaaggtgcttagctcagtgccagtacatagtaattcatgtaagaaacatttattgtatatctactgagggccaggtgccttactaggtgttggggactcaaaggaaccaaaattcctgctctcaagaagcttatgctctggtagggctgaagacacagaagaagcacacccttaaaacatagcatgataaatgcaatgatagtagtatttttagaagagggagactcagccctagtttgttggaagaggtgacttacagtggagaagaagagttcaccaagggatgggctgaagtattccacaactaaggaaatatcaaagaagcagcaatgtgtagcaatgaacagcaactggacttcttgtgagttttgtcagattgcatcctttaaggaattggcccatttcatctaggtgtatgttggggtgggtgctgggaaatggctgagctgggaatctcacagtttactgtctctaaccataaagttaaagcagaagtggcaggaggtgcaatggaaaaggtagccaggatcctgaattttgaaacgttatccattgtgttaatggtctttaccctgtgggcaacgaggagcccttgaagagttttaagcaagagactgattatggtcatatttgaactcatcttttaatgagttcaccttggttgctatttgggtaattatttaaggaaagaatagaggaaaggaggcccaagacacagttcagataaaagatgatgaaggtctgcagagattgtactcatgtctgccgtgtgttgcatgtgtaccatatgccagccctgtcctacgggatttaatttcaaattccaattgttcactgttggtatataggaaagtaattgacatttttgtactaactttgtatcctgcaaccctactataattgctcgaagtcccaggagcttaagaagttaatccttttggattttctacatggatgttcatgtcatttacaacaaagttttctttcttccttctgaatctgaacactttttatttccttttcttgtcttattgcattatttaggacttccagtatgatgttgaaaaactataacaggggaaatccttgctttcttcctgatcttagtggaaaagctttgcatttctcaccattaagatgttagctgtagattttttgtagatattctttatcatgttgaggaaattcccctgtatttctagtttactgagaattttttatcatgaatgggtgttggattttgtcaaatgctttttcttgatccactcaatagaatcatatctattgatatgatcatgtgatttaaaaaaaaatacagagacagggtttcactatgttgcccaagcttgtctccaactcctgggttcaagtgatcctcctgcattggcttcctgaattgctgggattataggtgtgagccaccatgcctggctgggattttttttttttttagcccattgatgtgatggattacattaactgattttggaatgttgaaccagcattgcatacctgaggtaaatcccatttgatcatagtgtatacttctttttatacattgttggattgaatttgctaatattttgttgaggatttttacatccacgtttgtaagagataattggtatgtaattttcttttcttataatgtctttgtccatttttgttattagggtaatcctggcctcatagaatgagttaggaggtatgccctctgcttctatcttctgaaagagattatagcaaattggtataatttcttccttaaatatttaataaaactcaccaatgagcccatctgggcctggtgctttctattttgggaggctattaattattgattcaatttctttaatagatatagacctattcagattgtctatttcttcttgtatgagtttcgccagattgtatcctttaaggaatgagtccatttcatctaggttatcaaaatttgtggacatagagttgttcatagcattatttcttcattatccttttaatgtccatgggatctgtagtgatgttccctgtttcatttctgttattaataacatagatattagtcctctctcttttcttagcctgattaaaggtttattgatcttattgatgttttcaaaggaccagcttttggttttattcatttttctttattgatttcctgtttgcaatttcattgatttttcctttgatttgtattatttcttttcgtctccttccttgggatttaatttgctcttccttttttagtttcccagatggaagcttaggtgattgattttagatctttcttctaacgtatgcactcagtgctataaatttccccaagccctgcttttgctgcatcccacaaattttgttaagttatattttcattttcacttaaatccaagtatttttaaatttcgtctaagatttcttttttgacccatatgttatttataagtgtgtggcttaatctccaagtatttggggattttccagctatcagactatttctagtttaattccgttgtagtttgagagaaaacattgtatgatttctattattttaaatatgtttaggtgtgtttcatggcccatggtctgtcttggtgaatgttccatgtgtgcttgagaagaatgtgtattctgttgttgccggctggatctgtccatttctgacagaggagtattgaagtttttaactgtaatagtggattcatctgtttctccttgaagttctaccagtttttgcctcacacatttggacactctgttgttaggtgcatacaagttaagaattattatatcttattggagggctgaaccctaaatcattatgggatgcccctcttatccctgataactttccttggtctgaagcctgctctttctaaaattaatatagctactcctgttttcttttgattagtgttagcatggtatgtctttatccattcatttacttttaatctatgtgtgtttttatatttaaagtagatttcttgtagacaacatagagttgggtcttgtttcttgatccactcagtcatttaaggagaccagaggaggatgggagtggtggggggataaagatccagatccctctaaaataagcaagtgctttagctaaaccattctactccttatttcagaggggagaaaagagcagtcatagatccaagataaaattcctcctccctgctttttattactttgttttatcctactcctctgataaatggatagatatgttcagaacatataactcacttaaaataatatgaatgctaaacatgtgccaggaaatcagagcagctccttgtgttttcccctttttaggaggtctgggaggaccatccacccctcctggaaggccctgactcaaacactacaacattagatcccagcttcccctttgacagagttttgcaggttcccaggagagaggagtggtcatgaaaagggggtggggcctctctctggatgggagaaggcactggaactagtaagctatcatctctcagattccgctttgggcttcgccttccccagtagctgtcacctgcctttccctttgttgttggggcactctgctacaacctgcttcatgctccccacttactgcctccattgtttccctcccactctgtgcaataattccctctcctcccttcttcttccaggggccttgttttaggcttgaccttggcattgctggcatcctaattcctgcaacgagcatttacttgttcatctaattcatacaatgagcacctactgagctcagtagtgagttcttctaattcatacaatgagctcagacatgaagctgcccctatggcctcagggatcaaggagggctgtgtagggccatggtgtctgccccctttctggtgcccaggcagtggcccctgactcttgccataagtcctgttcctagtcacatggccacaggctctacctctttctgccactcctctgaccctctgagggaccctggaatccatcagtggctttcaagccccctgaggcacacaggacttggtaagaccatctaaggaccatctgcagcatcttttctcaaaggcctgaatgccttcctggggctctgcctagaaacagggcccagattcctgctgttgctttttgaagcccaaaaaccacactgaatgttgctctccttcctgaatctctgcctaaagatcaggaatatgtgagaagaagtggaatctctgctccgttttcaatctcccctcacagattagtctggcctctcctatgtatgtcatcaaatgtcaatagtgcaggttttgatcaggcactggtttgtcgtttgcttttttttttaattaacttcatctccacaaaagtcttatacactcatcatagggagtttagatgacacagaactatataaagaagagaataaaaataacctataatatcagtactcaggaagaaccactgttagcattttgtaagttactctcctgcacatattgttttatatacttgagattataactttgaccctactcagtttgttggtttgtttcattttttcactgtgttaaaatacacataacataaaagttaccacctaaactatttttaagtgtagtcttcagtggtactaagtacattcatattattgtgcaaccatcaccaccatccatcactagagcattttgatctttccaacctgaaattctgtacccattaaatattaattccccattctcacctctcccaagcccctggcaagcaccattctactttctgtctctgtgattttgactactgtaagtatctcgtgagtggaatcatatagcatttgtcttttagtgattggcttattttacttagcataatgtccttaaagttcaagcatgttgtagcatgtaccagaatttccttcatttttaagggtggataatattctgttgtgtgtatataccacattatgcttatccattcattcatcgacagacagttaggttgctttcacattttagctattatgaataatgttgctatgaacgtgggtttacaaaaatttcttcaagaccttgctttcagttattttgggtatgtacccagaagtggaattgctggattctaatacagtaattctatttttagtgttttggaaaactgccatactgttttccacaatggctgtaccattttaaattcccaccaatagtgtacaacagtttcaatgtctctacattcttaccaacacctgtttttctcctttttttagtgatagtcatcctaatgggtgtaagatgcttgcttggttttttaagtttacattatattgcaagcactgtcattaaaaactctccagacacatccctcctccaattcctctattgttggaaatttaggatttttttctttcaatatttttgctatcataagtaaaattgcaacagagaatttgtgcataaatttctgctgcatttttggttatttacataggcaaggattgctagataaaatacaggatgtccagttaaatttagatttcaaataaacaatgaataatttgttagtgtcagtacactcaaaatattccccgggacaaatttattctaaaacagtattcatcatatacctgaaattcaaagtttgctaggcatctttttttttttatttgccaaatctagcaatccaaccatacgtactattcccaggaatgaaattaatgagttaaagttgatgaacattttcaagattctggatgcatctggccaaagggcttttctgtaaactagtgccaggttcctctccactaacagtaagtaagaatgcctgttttctcacaaaagtggctgctttgagttatttcatttaagaataaacaaaagtttgcttctttgataggtgggaaatgatcatttacaaagttttgactatgaatgaaactgacctttcattccaaaggttggtcttttgtatttcctttcatgtaaactacgtgtctgtccttggctcatttatctttttgtgtttcttgtcaagccataagaactcttaaaggatattagctttgtggctttcacattttgttgcaaatatttctcccagcttattgtctgccttttaatttggcttatattatttgccaaagtaaaggcatttgatcgtcttatgtgttctaatctctaggtctttcatgattcttccattgcttttagtccacagccccttcttacttagattacatatatctattcacctgtatttgcttcaagaaatctgtgttgattctttttagtgttttctacatttaaccgtctaaactatatggagtgtctttggaaatggtgttcaatgagtttctaaattatttcttctcttcagatctctaatttgcttcagctatatttgatgaataaaatctcttccttcacaatgacttgtgatgatactttagccttatacataaagaaaaatctattttccttaaaagtgagcttctctgtcatttaatctgtctgggtcttgctatattaactatacaatgaggctattttataattcattcatgtattcaacaaatatttattgagcatcttctgtgggtcagatatatatgtaagatttcttagcagacttagctgagattaaaggaaaaattaaaataaaaataaagatttcttccagcattaaaattctaaatataaaagaacttcatttattcatcctcagatcactggaggaaactgacataatttgcttcacctgttgatttttttcattcttttatattaatctagtctactaattttattcagatcttctccagaacttttacctcttattgctactgcatgtcttattgcattggcaaaaacttcaaaataattgttacatcataaaactatgtaataaaagtgatagatgacacccttgttttgtctctaaggagaatgcctcccattttgtgccattaagaatttcttggcttttggtttaagatagaggtatttttgtatttaaaaagtaatagtctcttcttatttttctaagaggttttttttaagtcaggaaatacttgattaattttattaaatataattttagagcctgttaaggttattgtatcattctttatgagttttgcattttgaagtacaagtactactaacatagtgggactacatgaggcagaattaagatgaatacacacagtcctcaccacattatatggtgcttttgtgaacagcaattctaaacttgaagtacattttaaagccttgattgactgattaatttgttgttgttgttgttgcccaggctggagtgcaatggtgcaatctttgctcaccgcaacctctgcctcccaggttcaagcgattctcctgcctcagcctcccgagtagccggaattacaggcatgcaccaccattcctggctaattttgtatttttagtagagatggggtttctccatgttgatcaggctggccttgaactcccaaccttaggggatccacccgccttggcctcccaagtgctgggattacaggcatgagccactgcacccagccactctgattagttttttaaaaattgagcatatatatatatatatacgtatatatatatatacacacgtatatagatgtgtgtgtgtatatatatatacacgtatatatacgtgtgtgtatatatatatacacacacgtatatatatatacacacacgtatatatatatatacacacacgtatatatatatatacacacgtatatatatatgaaaatgagaaattcgaacccgcatgtgtgtgagtaaagagtgtgcagatgttgcacaaaactctgtacgtgctcaaagtagaatgaacccacaaatatcccactaatacttagcttttatatggctggtctccaaagtagggtgtgtgcaagttgatttattgaggtaagaggaagagattagaatgtctattttgtatctcatcctttaaacttttaatttgttatggtgaaaaagacattctaatcttttccccttaccccaataaatcaacttgcacacaccctactttggagaccagccatataaaagctaagtattagtgggatatttgtgagttcattctgcctggggcacatacagaattctgtgcaacatctgcacactcatttgaatttaaatgtacagaattcaaaatgccctctgaagcttaacgaagaatttttaaactagtgggacaaagctcaataatggtaaaagcacacaaacacacacacacacacacacacacacacacacacacacacagggaaaaacaagttattcaactttgcctgacttggggtaagttatgtagcctccttgggactcaatttcctcattactacaatgacagtgttgggccagatgctcaccaagcctcttcctgcactgacattttgtgatggcgatgaccctgtggggagtatcaggttatgggagaaacagatctacatgtcagtcagcagggcaactctgttattagaaatcaagcagagtgcagtcctaggactgatgaccaagagtccagtgtgcacaatcctggctgtctccagaggcaaccctcgcatgtcatagcaatggaacatgaagaggtggagatcttttggagtgatcagagaaaggattaaaacattttaaaatgagtcctctggggaaaagttacagaaattggattccttgggcacattaggacacattaagatggattgagctcccagctccaagctccgagctctgagcatctcgtggttgagcagcttgctttatactgattgtgacagtcttgggcaaagctctttttgtttcaaggaacagaaacccacccaagctagctcacagaaattcacagctaggaacacaggggtaactgggactcacaggaatagacacactatcaggaccttgggcatctcctgggggctttatgttctaagcattctctctctgagcctctgctccattctctactccccactttgtactctctgtttccacttctctgcaagatcagcgcacagatggacatcatggccccactccataccttgcatgacttttcagcctaagtgtccattggccattagcccagtctttccattttcaagtctaggttcccctgaaatgatgtatttatcttacttaaccttagctttttgtgccaagccacatcaataattggtcatcgttggttagccaatagatgggtcacccttgggtcaagtgcccacccttggtccagtcatgtgtgaagaggggaggtgagtcgcgtgctctcagacagggctgtatggggcagatttcctccaatcactgggggagcagattggccatgatgaacaccttccgcaaagagaccaactgtcttttaacctgatactgatatgagcacaaaatcagtctgaccctgagcctttatacaggagtaagatgtaataacacttctcaggacaccctttgaaataaggtgagactccttctgccttaagacaggctgaccaagggctgcctcgctatggtggtggcctgggctgcagggctcctgagagccacctcttggcccattggtctgggagactctaaagtcactccccccgcagagcctaatttctccatcagaaatgtctgatctttgctgatgggtggttagctatttgagggatttacaaagcactaattctgtttgaccaccgaaagattttccctgcttaagaagatgctaaaaactacccaaggacctctgcaccctcttggactggcttgaccaattttcatccattttgaatattcaatttctagctacttctctgaaccaactcacaacccagtgactgacttttcattccttaatcctacatgtgactcttctgctcagcatcctgcttagaatccccaggatcttatagaacacagaaaatgggacattaatgaacaagcaggcagggtgattgtctgtggtcttttacctgtgctgggtttaatcacagtaccagcctgacacataggtgggcagaaaactcagtttcctcaaatgcaagggctttgagagcttagacttcaaattagagtgagatctatctaccccaaacaaagctactcagacacctcactatctaaaatcagaccagaacctggggatgagccaagaaatgtctaagcagccaacattatctacagaggcccatactgttgtgtttaaagtagcatctaattcaaaacaactagtttctcagagggctggatggcctatcaccctttaagaaagcctggatgaatcctctcaaaataggaaaagctaggttccttacaacctatttactttttgtttacacagaattttggcacatttgcatatctggtttctcaatccagaacagactaaaagaaaatgagtcctgagattgctacaggtatgaacaaaatagcattctccctcacaacagggaaaagtaaccactaccacaggaagagatcagaaaatgatataaagtagacccaagaacctcaaaagcatagcaatatgaagagatacaaatggccacacatatctcaaaggtttgggcactactgggttaacagtacagtaactgaagtttctaaatatgaccctaagtagaacagaaatgtgaaattaagatcagtatattctattttaaaacctggtaagcatatgacttttttaagaaaaacttccatccaaaatgatgaaatgtttacatgtgatgtttattttattttattttgagataaggtctcactctgtcacccatgctggagtgcaatggagcaatcatggctcactgcaacctccactcccccaggctcaggtggtcctcacacctcaacctcccaagtagctgggactacaggcgtctgcctccatgcctgctaatttttgtatttttatgtaaagataaggttttgccgtgttgcccagggtggtctcaaactcaagtaatctgcccgccttggcctcctaaagtgctgggattacaggtgtgagccagcatgcccggccacatgtgatgtttaaaaggacaaaccttaagctagctggaaagctccactatccagaaggatgggttttgttctggataactgaggttttgctatatagctgaagtcgaaccctctagaccacttcttaaaggacatcagggaagcttgtcagccagggaaatgccgttgctgtgacttatatgctatttggacgaagcaaacgggctgaagaaggtttgactgtatttggttgtaggcttcgcttggcaccgtctctttaaaaggctgcctgcctttgaactaatcctctatttataatccagctggagagaggcctcggcaatgtatacaaattcctagaatttgcagagtgctgctcacgtaagccctgaaccccactccagagcttctgcctgggccctcacttctccagcaaggaccctgaatcatcccggaaccgtcttggtgctgtggtagacaggccacctggcacgcccagcgccccacattcttggtgggaagcacagggcgcatctgggaatgggggcatgagttggattaggctcagtaaacaccatcactcactcctgatggcctgcactgctcaatggctctttcctagagaccaagggttgaggcctcaggcacagctcacctctatagggctgttcctttcttataattcattccctcccaacacgacgccaacttcacattttcctttcttccccccttgcacaaattattgcaagtcatggcgatctaaatatagcccgcagtctgcgctccagatgccgaggccacgcagccccgatattctcctggtgtctttccagccgcctcttgctcttgctgtcctttctccttgctcgcccttgttttctccctgatactcctactctctgcctcccagtctccccaggtctttcctgtttttccagttcaaaggaaagttctaaaagcaaggcctgaagcctggacggccccctccccagccctccaacagcactagctgtgggaaagggatcccgtctagagaagaggcagaggtgcagcatcctctaggaccctcggccatgcgtgctgtgcgttcttgcccaaccttcacttactcgctttgtccagaagttgtttatcctccttcctcctcatctgtttcttcttggatcctggacgccaaagagtgactggccactccttccattcaatcacctcctgtgttactggaaaatatgttaggacaccctccaagtcattactttcttgaagttaaatgatatcaattccttttgcctcccttccatgggcctaggtatccagagctttcatcatctgcatggattgtctctgtaccatctccaagttggccatatcccctgtaggaagtagggccaggccttgagtcctctgtcctgctaagggtttgacatctgctttgtgagcataggggagcaatttactgatacttcttaatcacaggcccctaatttaaaaagaagtgctacagtaatgatgtgtgttcatacctaacttgaggtccactctgataataggctggtccttttcttcactgaaagcaaagcatttgattcacacgcatgttttattctatccttgtcaatatgcttgttcactcactattagtcaactttcttaagttctaacttggtgggctcacggtgacccacatcccacaggtggagagtatataactattaagtcagtctgctcatttatttattcaaaaagcagttattgaaagctgggtgcctcggtgcatgcctgtagtttcagctactcaggaggctgagactggaggatgcctggaggccaggggttggagactgtagcgtactatgagcatgactgggaatagcgcactatgagcatggcaccccagcctgggcaacatagcaagaccctgtctttcaaaaaaacaaagccaaaaaacagttacaggatacctctttagacctagccgtggatatacaaataagaatttgcctcaagagatacacagactagtccagggtttctcaacctccgtacaactcacatctggggccacataattgtgtggatggccctgtgtattgtaggatgtctagaagcatccctggcctccacccacaagatgccagtagcaccaccccacacacaaattgtgacaaccaaaaatgtctccagccattgccaaatgtctcctggagccaaaatcaccccaatttgagaaccactggtctgatgagatagatagatatgcaaatgatcattacggctcaaagaagccctaccatggagacacgaacacaggcccatgcacagagggcactggagttgaattctgaaggatgggtgcaatttttccacgtagagactatgctggagagaggatattcttggcagagaaacagcatgtgcaaaggcacaggggtaccacagaacaagtcagttgcctgacatggcagctactgggtaggaacaaaaggagatgaggatgaatgggggctggccccagtgtctaaagggccttgtgtgactgggatgcttgcacttgatcctgaggttagggaaagcaagaaggtttgtaagctgggagcatgattgttggcatgatggcatgacgaagagaggaagctctgatgacactccaggaagagatgatgtgggcttgaatgaaggcattggtgcttgggaagggaacagaaggggcaggatttgaaagctctttctgaggcagaacgtgcaggatatctgagtggagatgaagacagggaataagcccagcgctacagagctgatggaatcctggtggttcggtcttggcattaaggcttttttctatcccagaagcattctggagtttgggctgtgcccaccttgtctgggaagatgaggctgtggggacacctttacgtcagggtgtgtttctgctcatccctccttgtttgcttttagatcaggctcatgggagatgtctggtggacagaaccccccaccccctttaggaattgcattaaggacatgagctgctaattttgtcgctgtcagtgcctggcaggcagatggccctgagcctcagtttctccatttgtgatgggaagagaactccccgccccatctcccaggatgtggtgcgtgtgaacagggctgtttctgtgggtggtttagacccccgtgggtgcttggcacttcctgcctgcagttggtgaggatcgtgagcagttgtaatcaggcctgataggaaggcccccaactctaccgcggccttgagtggctgccagctccatgaccaggcctgcttcaaaacttgcctgcaagttatttttttcagggtgtctggttcctgtaaacaggctttcccaaaccctctcaggctccaagaacccgctttggctgtgcatcccactgccgttcatgctccccagcccaatggaaaacctcaagacaatcccactccatttggcttcatgcaagccctcccctccagctccctccccccctgccttcccaggtaagttagagtgaaaggagggagtaggaggctgggatggagacaccttagagagaggctggccccaccaggcagtcatgatggtctcaggcctgctatgtaacacctttccccagcacacctacactgggtgggctaggtgagtgggttgtgccaggaggcaaatggtgagtgtgtgtgtgtgtgtgtgtgtatgtgtgtgcgccagctagctgcccccactctcaggagcccggtgctgatggtgatctctctctctctcaatgcaggaacaaggggctgcattgttagctagcctatctcttggtttctgattcaccccgggccacggcagcctgagcaggttcacagctgctcagggttatactttccagcacatttaggacttggaacagccccaggtttcaggaacacatggtgatgggggaggggaggggctcaaatagacggggtgtgggggaagcgagctacttctttctttcttcaagatgaatctccattttcatcatctgatagcaggaacagcatctgaggacggcggatgaattgcaaacctgctcaggtcgggggagagggcaggcgtgtgggggagatgggcagatttagttcatcctggctgaggtcttcttgtgcagccgtgtaccctctgacacacagctcttgctccagttacagcctctgcacagccagggcctgccagggacgcccacccgcggggcactctggcatacatctcggaagtcagcccccagagtgggcctctggcttccagcagccatggccaagagggcagggaggagctggaaaccggccctaagaggtgggacgtgaggaacaccagcttccatcttacagatcggcggggtcttttctctctgttgctagtggctggctaaggaggaaatcgagactataatttcccagcctctaccatctccctattttctctgagacaagtaactgcctcacagcagacaggaaccaggtgacactgctgtcccaagcattctgcccacattcaaccacagccattcatccatccatctgatatctgctgagggccttctaagagccaggcatggtccaggtgctggcttttagcaaggagcagaacacagtccctgtcctgcaggagccaggagaacccacaggaatggcaggcattgacagcaccatgtacaaggggctcgggctgggcaaaaccagatttgagcactgtcagtgactttgaaaagcctggaccctgctcacctggcagcaggcagcctcctcctctgctgccatctagctggacaatctggggcagggttctcttgagcctggtcatctcagcccacccacagagatgactataggtatcctgcctacctcctagggcagctgagaaactcaagtaagatttgtgcacagaatcccaaaatataaaacctttgtccagctctcagattcttctcccccttttctcaatggggtaactgaggactgaggcctaacatgcaggagcctgtatcagaacagggaggctgctgtgtgctgccagagattgccacccctcccagcctctctgggcagtactacacagagctggcctctgtgaggggtgcagagcagctccgggactcccacacagagcccctttctcctgcgctctggcccagagctcgctctcagggtcctataattgaaaaggcgaccgcaggccggcagtgtgacctttgggcctgcctgggcgggtgactgagttaggcccccaggtcccccacccctgagaggaccagccaggccccaatttttcacagacacagcaaggaaggtgcagcatggcagagaggaccgggctgagctcctggctcccagcccccatgggtcacttgtcccctctgctccacactgttcccattcactatgcgggatcaagaactaccaccctctctttgaggatagacagggagagaggacagggtgtatgtcagagactagatgagtttgcagctgaataaaagggtttaagcagcctggttaaaacaggaaagagcctcagtacaacctagtcatagtgctgcctttgactttctacatagaagtttctacaaagatggaatgttctagagttgcactgtccagtaggacagccactagccatatgtgactattgagcactgagatggagctggtgtgactgagaaacagaacctttacctaagtttaaatagccacatgtggctagtgatatccatattggacattgtaggtctcgcggtggggggaatgctgaggctttggagccacagagatctaggttcaaatcctgacgctgcagctgaaacttagcacttcatggctagggcatgctgcttgacctcttgagactcagtttccccgtcatttaacaaaatttttttgtaaagacaggatctcgctatattgcccagactggtctcgacctccaggcttcaagtaatcctcccaccttggcttcccaaagtgctgggattacaggtgtgagccactgcaccagcctccccatcattaaatgtagagctgaataatatactaagtgagcctggtggggggccaaggcccagggtccagctcataggagctgatagtccatctattaggactgctgcctcggcccctgcagagatcagtctggtggcttcaggcatctgtgtctaggagggctagattgatccaggctttttcttcctatgtgtgtactgaaggaagcctgcaggcaggaaaaggttgtttctccttagtgtgtggaggatttgacagagcaggtccagaagtgccaggacaggttgtcaggcttggaccttctgctctgtgctcatcagcttcatgcttcataaacagacatccctagattcatttggtgagcctggtggacccaggctggacaaagatgggataagaggacatctcctgccctggagctcagctgccagctgttttcctcctaagctgctgcccatgagctgactttcttcctcctacacctgaatcagaacttacctgtcccacctggtaaaaatctgctcattatttgcctgagtgacagctccttgccttggcccaggcactgaggtcttcctaagatctggccctgcccttgccaagaagcgcatcgccactgcacaactccgacaggagcaccagggaccatgaaaaagagggagctctgggctgggttggcaggtgagatggggtggggagagctccccagctgctctctgaggacagccacgtccctggccttgctctgtgggagcctctgagccagccaccctggaaaccttggtgctaccagtgccatgtcagtgggggctgcccggaccgagaatctggggctcaggacactcagccctgggcagcactgacagacctgtcctcatggtgcatggcaacaggggctcattcagatgatgagggccactggcccgtgccccctggtgacaatggccaggcaggagagctggcaagtgccagggcagccaagagtcacagaggaaaacagccgtcatagtgccaaggatagtgaagcttggtttccccatcaccccttcatctcatctgcaccaagtgtaatcactcagccctacttcacaatccctctacaaggaataggacggaatgaactacactccatccacagagggaaacatggaggttcagtcacctacagaaagtcacctagagactctgcctcagggttctccctgccttctgccccacaccccaccagatcatcatcatcctcgtcctcctgatcatcaacaccattgtcatcaccatttattaagtgcctgattttgtgtggagcatgcattgttacatcatttcatcctcactacaactctgtgaagcaggtatatttatccccagtttacaaagggagaaactgaggacccaagaagttattaacttgtctaaagccacacagctccctggagtaagagagaggctgtacagcccaggatgtcactccctgcacagcacaaccactcaggagagaggggcgggagggaggaaaggctggcgggatggtctctcctccataacatgccaccaagcccaagacaaaggtctgctgctggcaagggtgaccgtgtggcctggagggagggcagagagtggacagcgctgggggaaagccctgcagaagcatgctaatctgcacccctcctctccacccacggagccttttcctccaggccagcctgttccacaggaaaaacaatctcccctgcctggggacgtgaggccctggggccggctgggccaccttctggtctgtcttcattcagatcccatttctctcctctctggaagctgggggagggagtcacgctggggaaggcgaggatgaggctaaagtcttcatctgtccccctttaagccaagcaaagaaaaatagccctttgccaagatctttcatctcagtcatttactctcgcagatgttttctgcaatataaacaagaagcaaagaatgttggggaggagaagagggcgggaggcgggtaggagggaaaggaggagtgaattgacagctttgaaatctgggcctgcagagggcaggaaacaggaccttgggagggtcccgactgccctgagagcctgggcaacctcaggacactgcaccggggcaagccaagggtcgcttcccagggtgtctttgaaaggagattctggagaggcagcccagcccttgagtgggtggtctccccagacgccctccctctgcctgggaagcgacacatggacggcagctgctggggccctatgggcccaatctggagccatgccctgccagggaacacacctgcccaccttagcactccccaaaagttctggggcaaggacgctcagcctgctgccaatggaggcatcagtaggactgacaagagatgctgacacctgcaatgggcattagggtgcatgcgggggaaagaatcttgagctggtgggggttggcacctcctacagtgggtcaagaaataaaccaaggaaatcaggtgtctctgagttcactgttctgtgagattcctattgatgtcagtagcttttaaacgaataagccatggattacgaactcaaatgccaatgggggctggcagtaacccacaggagcaaagccaggtgagcactgccctgacttgaagaaggctggcccatctaaagggggcaccaccactcagtttcagctgggtatttaagacagcctagaaatccagagttctgtataaagtatcctgtttttaaaaatatttgcactaattaaaaacaaaaagcagaaaaataccgggctggacacgtgagacgtgctgctgagtagcttttagtttgtgaatcgtggatttgagatttttgcaaaatatgctggttgaatgaataaatgcttagtctttctgctcttcactttaaaaagggatttgtgagaagcttggataagaatccaatagcaagcttttattgggcatctactatctccccaaaatggagctaaacattctgatggattcagagaatcagaggacctggtcttgcccttgaggatttacactgtagttgggagaccgaatcagctcctggtgcagagcctgggcagacacggggttccagagcatgcggcaacagacactgctcctgccctcagggagctactgttctgatctgtctcctgttctgtaaagtgggaacacacaggaaatgagaccagtccttgacagtccttggttatgcggcacagaatgtttaggggaaggggagaaactaggcaatgctcccagagggggcggtgtttgggctgaaccttgaaagatgggtaggaagagccacttgtttccagctgataagtgaattctgaaactggccgacttctcacccagccaaaacattgagaactctgcaggatcaaaacccaggaccaccaaaatgagggagtcctgcttgctaagaaagagtggctgtcccacatctgccatcaacatgtcaccaaatcgcgtatagtgtctccaggggaaagtcccctagagccttcaggggaaagtcagtgaatgggtggcttgagcggagctgcagccacagaggaaggccagccatttaggaagcagtgacaggcaggcctgatgtcagcaacctttttgaaaggaaagagggggacagatttcacacaagggcccttgagggtttctgagtatccgtggtttcccgtgaatgactatagttttgtgctccttgcaaggaaaggaacggaaagggaaccaactctgagattcccacatattccacaaacacactgcagaacaggagaaattattcccgctttacagaacaggagacagaccagagcagtaagcctcctgagggcaggaaccatgtctgttgctgttgctgcacgcgctggaatccctggtgcctgccaggggtctgcaccaggggttgatgatgccaaatgtgacttgtttgagatcttacagccagaagtggcccgggggaaattcaatcccagatctgccagaccccaaagccctggttccttctgtgatgctggggaaatctgcatctccatagattcccaaaggtcacttaaaggagaatgctggatgctccaaagtttgaaaactatgagcggatgcactccatcatgggttggtatgcccaaggaagtgttagcatgaagggggcgtggcatgcaaacatattcatgtggccaggcattggaattcaacagagatcctttgagacaacacgccctccttttcatgcccggtagaggtctcttctccaacagccctgggtgcgaacatctctaagggaagccaactcaccacctcacgtcccactctgactgccagcaggttgtgctctaggctggcccagttagccatcacccagtggtctttgtactctctttctgtcctccaccaacaaggctcttcaacatgactaccttccagacacttgagaacctctcttttatttgccagctctcttatttatctcttctgcttttccttcacacattctcgtgtgacacactctcagtcccctcccccatccccatggctgtcagcaaatgcgatccattgcattttgcttctcctttaaaagcagtgcagtggcattccaagtgggacagaccagtaaagaggccagcaggagaaatacctccctcatcttcaacactcttcttcagttaatgtcacctaagatgacaccaattttcttggtaactgttcaggttgattcacgtcgactttacagtcaacacacacccctgagtctttcacacctgccccatcccgggcatgtataaaattccatttgtttagccccaaggttccagatgtacattaatcctattatatttcatcttgttacattcagccaccatgaatccaaactgttttgggatcttaggagattctaattctgttatccaagatgtcagctgcctctgaaagttcttcctagtctctaatagaactgttgaaacagaacggtcatgggagattctgggacacggatggaaccacccagcaggctgacatccatctgtttgttagcagctttagggccactcagcacatccccagctgtcccagtgacactgtctccagccctccttgttctcaagagagccatgagctgtctgctctgctgcctaccacaatgccatgtgctaccaacttaggaatcctgtctcctccctccaaaaaagtacagtgagtagtcatcttttttcttggtaaatccatgctgattcctaacgatcatcactttctttcctaagccttcataagccatccctttccttgtagatgagagaaattaaccctgagttcaaagcagaagccttcagacagctgtacgtgttaattcattatgctgggcatctccatttgcccctccacagccaccccatcctcctccccactgctctgtaccccaggaagctgaccttgtggaccgcattactgggcacccttgccctctggcttcagttgggttctgccagtgggaggcaccagcaagagacaggagggtggggccaggcgtggtgggtcacccctgtaatcccagcactgtgggaagccaaggtgggtggatcacctgaggtccggagtttgagaccagcctggccaacatggtgaaattctatctctactaaaaatacaaaaaattagctaggcgtggtggtgcgcacctataatcccagctactcaggaggctgaggcaggagagttgcttgaaaccagcagggttgaggttgcagtgagttgagatctagccactgtgctccagcctgggtgacagagtgagactccatctcaaaaacaaagagagagagagagagagagagagatgggtgggacaaggtcaagatatttatttatcctcctggttctactgtaatgggcccttgcttggctgtgtctctccactgcccctgtatctaaggccatagcccctgatgaatggctctctcctccagatactttctctttcacttcgccccctttacccttcaggctccccccgctgctagccctggagggcttcatctttccttgttagcttcctttagctttacgcataacttgtaagtagtgacatttctaaattctgctcaattaccccatttgagtgtgccgtctgtctcctgccagaacgctgaccaatacactcatattttgagtcattgcctaaagacttaggcctaacagtgctagacgtgggagggagtgtaggtgttggtgagaatagcataagagttaaaggcacggaatttgtggtctaactaaccaggattgaacttgatttccaccgctttccagctatagttactgaacttctctgagcctctgctttctcttctgtaaaatgggagcagtagtcccctctcacaaattctttgtcaggattttatgtgattatatttgtgaaacattaaatttagcatcaggtgcattataagcacttgataaatgtgttattctgattattattaagacagactctaaccattgagggtattgctttggtgctagaatacgctagcaataagcttcaaggttttcctgtttatgtccaccagggaatttggacctcaggtaatctgcccaaatcctgcccaaacaggagtaagaaaaaataagcattgttgttgctgttattttattagctagagaggcagtcaattctatcacttattgtcaacataattttttagcaaagactactctaggaggctgtagttacattctttctgacacctttcccctatctcttttctacataatcttagagtcccccaaccaccaaggatgattcctactgattcaaactaagaaaatgtggcaccttttaacctctgcccttacagagcttctccccaccacatccacccccgcccacaatgatattcttaccaaaataagctcagaagagagtctcttaactttgtccaaaagctaaatctgaaagaggttaaaggttctctggtcagtcgcatttcacccgactatttttagctgatatagggcaaaacaagtttccccaaagatctgggccctgtgaaagctggaatttctgccaagatggaggaatacagctctccctgctggaaaagagagcacaattccctctttcctcaccccgggatacctatttgctgccagtgaatctcccacctactctgtcatgctagcatttgatcacattgggttcatatgtgcttatttgctgctccaaccccaatccttactcctgagcctttaccactcaactatcaatgtgtccactcatcctctgggccatcttgtgccctcttatcctctatctcctgggtcagaagcttggcagttttctggatgtgactcctaatggaaatccatgacaaaaatgccctggattctcaaccagggagagaaactcctcttctcagcctcttctgccaatgtgccccactcctatttctctctcctgagagccctaagccctgccatgttccttctgtcctttcagcccctttcttcccctactcacataatgcaccaagggtaagcatcttcctgcccagatatatctgccctttcacatactcccatgtgactctttgacctctgttgttggaatctcttgacttagaaaaccagagatgtttccatgacttttaaggcttttgttggcaagacagcaaggagaatggagtgaggggccaagctcaggctttctgcctggccccggagggcaatgccatgggaaggtgacctcgtcacaggcctgggggctatcccagtgggatgacgccattgggtactctatctcaggctcctctgttgctctgcccttcaggcaggatattgagttttaagttaaaagacaaggatcgagcttcatcttatgatttatggtttaggccagggtttccaaaactgtataaaaagttattcctggccaagttccctattagtcatatgtgtgaagtggaaacatcactttatcagaaatatacttcccccaacccatcccaaactgtgtctataatcaggctctggagggaagacactggtattagagctggtgtcaggagaagaactcaagggaagacgctttactaataggactgtatggccctggcagtggtgattataccaaacacatatggaaagggatcatggggcagccaaaagaatgatgaaaacttcacattggtactgcccctagaggtgcttttccacgaatggctagattatgaatgtttaagctttcttatttaagtgaccttactccatcagcacccgtccactctcttctggtacccatgcccctgtttcttggggaatcccacaccatgccctgctctcagtccatgagatttcagtgcagccaactttacccccaactcagggtgaagcacaggacccaggcctaagccaatcagagcattagattctcttgggcatagtgattggtttaggaatggacatctgatcaatcagagccaatgagataccttaaggtcttccctaggacttctgggaaggggactcactctttcccccttgaacctgaaatctgagaggtatagagctggaattgctgtcatttttctgtcacatgaaacctgactctgaagccagcatagcagagagtagagctgagagatttttctgtcacatgaaacctgactctgaagccagcatagcagagaggagagctgagagatggagagtacccaagtcctgataacacattattttatccctgaatcaatttatatctgatgctggccctaattctggatctttttgttgcatgggccattggatttcccctttgctaaagcagtttgagatgactttctgtccctggcaaccaaagagccgtagtttacagctattgtttaaaaatacattcctaagtgtaaatggaactaagagaaaggagacagggccagcaatagatctgtactttgcaagcacaatctattgctcaggggcacagacagaggcatatcacatacttaaatgtgaggagagcagtactgggaggtcctcagacaggaagagggtgaaccccaggcaggaagttccatcagcaagcatcatgtctttggaaatgaaattattaaacaaccagaccatttctattgagtttcgtttttgttacacccctcttggtatgcttaacatagtaataagtattactgctatagtgaaactcccttatttatatcatcacaatttctatttccctattatttactcccttttcctatgaaataataaaaatatttactcatcatgaaattactttctctaatttaatctgcttttcccccagtgtattataaaggttctccagagaaacagaaccaacaggatctccctctatatatagagatagattagatatggatatacatatgtagatgtggacagaagtgatgtctgcctctttcagggttggccttttaaagcaactcagcaaccctccagctctctcttccctgatgacagcaatcctgaagtcacgtgtttcaggtgacataaccactgagatgcaggggtttatttgccacagcagcataacctttcacattctgactaatgtagatgtatctagagagatgtagctatagacgagatggagagagatggatttaagggaattgacgtatgtgacggcggtggagggaggtggcaaatctgaaattttgcaggaagttaggtggactggagagcaagtaagagttgatgcttcagccttgagtccaaaggctggaaactcagacagaatttctgaaactcaggcagaatttctgttgcagtctggaggcagaattccttcttcttcaggaaacctcagcctttgctcttcaggccttcaactgattaatgaagtccacacctattttggcagtttctctgctttgcttaaagtcagctggttgtaaatgttgactttattgtaaatcaaatataaaaactaccttcacagaaacatctagacaagtatttgaccaaatagctgggcaccatagcctagccaagttgacacataaaattaaccattacatccagctggagccaatattcccccatgctcctccatatattagtgagggttcagctttggattcccaggccaacactaaggtagacactgcaaataatgaacccttgacaaagctctgttagttcccagatggaagaaaattaatgatgattgctcaattcagtctggacagaatgctttactatttctgttgtggttaaagtatgtaagtcagctcttatttattatatctccattggtttacttttcactgtttgaggaattctcctcccagctaccatgccagaaaaacacttacaccctgccccgtggatccccaaaaactaaggatgtatccacagacctaactgaaggcagatcagccttcagtaaggtaactccagcaggagaaagcattttccccgttgtgaggcctgtgggagatcctcatctgaggcagatgtaaagaagcacttccctggcctgggtctgctgggaaacaagtgattaccaatccttgtgctgtccatgaaagggcctcacccctggctgctgagggtctgggaaatatctgcttcaatgaatacccaggtgctcatttttcttctccccagttacctgctaaaggctccatcttgacatcaaccctggggtcaccctccaggatacttcctcgaagcagccacattcctgggggcatctgtgccagcaggggatggtgggatggcaaatcagcaagttctgtcagtcctcagcaccactctgtccacagcctcatgagagttttgtctgaggaccttcattaggcttcagggcctgtggctgatgactccaggtcaaagccccagatgatacctgctcatcgaaaaccacgcattccactccacttcccggcctcccctgccgttaggtggaggccatatgactagatcctggccaaacggatgtggacagagtcatgtcagccactttcaaggcttgtctttaaaagcatcacagcagccctccagctctgtctgtgatggcagcaatcttgaagccacatttcaggtggcataaccattgagacatggggatctatttgtcactacagcagtagccattcccattctgactaaggtagagcataaaggaattatgatccatggctcccctctgccgcccgagtcatctcacagatggcgggctgttctcctgcacccccaggcacgctgatccgtgacatctctcccaatcgctggttaaatgacctcagacacctgctgtgctgaaggtgacaagtcaggggcagcatctgcatgtctgaagcagctcaggatcttctctgtgcccaaatccccaagaaaagtctaaaactggtaaagtaattgaaccaagatgggttttcccgaaagaccttttacagctttgagctcattaaggaaagaaagaggatttcaagacctaaacagtgctggattctttctattttagttgaagttgaaaagacgatatctttgctagagtccagaaagagtcttacctgttgaaaactcatgcaacttaaagttccttcatcacggagagcctaccaggcctgccacgtggcatgacccatggatgtgggtgggactgcttggtattttcagactgttggaaacagtggcctcttgatctcagagagagccaaattaagctgatttcactatttataatccctccggaaataagcaaagaagagaagtctaattgcaaacagactgaactttacataggaaatatgtaggccccctgaggcacctagaaagtgtctaaagccctaactgcctccctgcctcccctgcttccctctccagagcacgtaggccacatctagagaggcctgaggctgcagaatggccctggactggccaaaccagcccagccagccccttgggcctaggggcagggacttttggatgagaaacaggaagacatttgcccacagcttgaaccatggctttgggaagactctttgttctttcttccccattattttgggttttctggtctttattccgtgcttgtcaaattccaggcatgcaaggctttcaaacacactatcaaacccgccacttacacacacacacacacacacacacacacacacactccccacccccattgcattcccatcacaatcacatttgtagcagagccctgggatttgtaaccaagtggggcccagtaagagctttgtgaaatttcacatggcccctggccttctgtaacaactccagagctaaagccccagccagaaccctgggccttgctggcagctgtgctgccgggtcactgtgggagatgagacaaggacctgcgacctgctgtgcctcagtttccctgcctgtcagtttggacaaccatgactgcagctaattctgaattgtctgcctgctggtgggaccaggccctggtggggggctcagattaatggcacggaagtcccagaatgagtcaaagaagagagagaccaaaatagatcaggagccaagcgcccagaatggcagccagagaagattagacacgctgccgagagaaccgtcccgatgactttattgagggctcttgctcataaacagccactatgttattgtaacttccacagaccaggccgacccttccttgtgacgggaagtttgggattggaaccgtccgtgggccctgctgttgctgaggtcaccctgggagctggggctcttccaaaaggaaatcagcatggggctccggggcttggtggaacagtggacagatggatggtttttgagtgagaaagtcatggttaggagtcagggaagagtggcaagtgccccccggcccacccctctgcagttcagctggtgggactaagtctttctttatgggcatttctgctgaaaagtccttcctcccttacatttgcttcttggtctcatgaatccaaggagagggcactaggccagggtgacagatgtggaaaaagcccagaactgctgccatagttcccatccctgggagcctccagtccccagccatgcccagcaatggcttttcctctcacatcctgacccctcacatcctctgtctcattgcacagcccttgccctcctggccacttgctacttttaatcctcctctcatgtggagagcagccctggcaggtccatccactctcatcttccactggagtgcttcaggcaacaatggaaaaacttaagtttgccagcaaagtggtcgaaggccagaacttgtccatttgaagatagagacacaaatatctcatttcagtaccaaagaccctttctttcttatcactgccagctctccaccacccatccatctcctgctcatctctgctggaaatgctactagccaaggcgagccaagccaaacagctgtttgtgggctcacagaccctccaaggataagggtctcttctgtgatgaccagattgcaccctgatgccagccagctcctggcgtctgctgctggcccccccaagatggtagcctggggagatacagcccaaacgcctgatccagtctcttcccagtctagctctgttggcaaaatgaaactccctgccaagggaaagccagtttggactgtccaaggggcacccatgataactgggcaaaccatccatcctgggttggtccgtgtgctttgagacttacactaggtgggccagttgaggaaggagataggaggaagaagtccaaggcaaatgtcagatttttagacaagccactgctggcaacatgtttttatttggaaaatattgcacaggaacttacagtgaaaaagaagctttcaaagccctacataatgtaaccctatcctaccacatctccagtttgctgtaccatgccctcccctatgtggattcaccttggccagacatacaaacccaccccctatcctcctccatccctgctctttgtccttgctcattccattccctttgcttgaaatatctgtctagactgtgcccatcttctaagtggtccagcttcaactctgctctctcccccaacaccccgcctccgacaacctctggggagcatggagttaacattgcccctcctgtgctcactgcattttttgcctaccatagacagtttaattattgaaaaccgccttgtatgttctgtttcagatatgttggctttaatgaatctgtgtgtcccctaaccttgtctcagaattccttatatgccccaaggatgcctccacagtgctctgaacactgtagggccttaggaaatactgatggctttgactggttatcaaaaaaaaaaaatgtaagtgatcaaaaagatgcataaccaggaagaactataatgttcagcaaaaactgcgagagtggttccaggtgctgccttcttggggtcagtggtataatgggttttcctttccagacagtcccttgatagtcctagaatcccacaggacagttgggtggacagtgtccagcaggcaaacaagaccataaacgcaaagccagagaagctaaacaatgttcactttacaactccaggtgatgataatggtatttatagactcagtgacatgtttgaagctgtgagtcccagaggctaatattttaagctggatatcctgagacccagacgttctgtttttgttctcctccccatccttccctcctgtaacccctggaactttccatgcaatctggacaaaagcatgaaacctctattgtttctcaatccttactagtgctagggaaggatttaagaactgcttcatggaagggtgacttgtgatgagtggaaaacattctgaggccttaaaatgacatttgccattacaccaaaacttccatcagagaatttcaaaattctaggcagagacaagggcctttctgccgtcagagaactccaatggtaaaggagctggggtttggaagagtgaggccttatttatagatgaactcatcttggccagaggttctggagagtctaggtccacctatttaagaactttctttctctcaggtccatttttatattggataatcattcctgaggcaaatctataaacaaagggtgggaacctaaaacttggctagttatatagcccagaataaaatggggaaatcagtgttttccttcaaagcaatctagaaagcactagccaaagaacaaattgcaaacagctacacaagcatcagggaaatcccatcgatcataagagatggaaaataaccatgagatcattgcactcatctcccctggggcctggacatccaggatgcagcttcatggtgtcccttcagagggtgttacaggcattacctttctcttgctttgcactgtgaatcgtgctcctgattagtctgcaatacatccccctgaagacaggcagcaaccacagaacacagtacctcatgcataggaattaagtccagaacattctctactaggtgggttttttgctgtttgtaaacaactctagatgttcatccacagttcactcaactgtgctgactggtttcatgcactagccagaattggtcaaacttaaacatgcacaaaatcctgtagtcactttaggcccaagtccaacatttagaagctatcaacacaggaaaaaagttgtacctgttttcacgctgagaaaagcagatagctaatctgtaccaggaaaacaaacaagaaaaatgatctgaaaataacttggaaggttttgttttcaccaaaggaagcataaatagtgaaacacatacacataagacatgcatgtacacacatatatatacatgcacacacatacacacattgtatgcacacatatacataaacacacatacataaacacactgtacacacaaatatatacatgcacacacatacacacacatactgtatgcaaacatgtatacatgcacacacgtacacatactgtatgcacacatatatacatgtacacacatgcacatactgtacacacatgtatgtacacacatatgtacgcgcacacacatacacatacatatgtacacacatatgtatgcacacacatacacatactgtacatacacatatgtacatgcacacacacacgtacacatactgtgcacacacatatgtatacatgcacacacatacacatactgtgcacacacatatgtatatgtgcacacacatacacatactgtacacacatctatacatgcacacgcatacacatactgtacacacatatatatacatccacacacgtacacatacacatactatatgcacacatatatacatgtacacacatacacatactgtacatacacatatgtacatgcacactcatacatgtacacatactgtgcacacacatgtatacatgcacacacatactgtacacacacatatgtatatgtgcacacacacacatactgtacacacacatctatacatgcacacacatacacatactgtacacacatatatatacatccacacatgtacacatacacatactgtatgcacacatatatacatccacacacatatacacataaacacacatactgtacacaggtatacgcacacttgcatatatatacatgcatacacacatacacacacatatacaatactgtacacacatatatacacacatactgtatacacatatacatcacatacacacatatacatacatatatacgtgtacacacatatgtatacacacgtacacactatatacacatatatgcacacatttacgtatatacttacatatacacacgtgttttcctcctaattacaaaaataaatacagaaaaacactactagaaaacaacatgttattgtgttccttccagaatttttctatgagtagtcacctgtattctaatgtatcatacatattatatgttacattatgtatcgtataatatataaatgaggaggtatatagaagtctttttagatatatttaatgaatatatattttaattaaaattttatataacatataatgttaccaattttatttttttatttctatcctaaggtaacatactggttgtagaaagtcagaaaatgtgtatgagtaaaagaaaaagtgaaaatcatgcatattctcagcattcagaaaagagtactttcatttgttgtatgcccccctcacttatttaaatatacacccctaagtataaaatgggaagtcccattacacaggggtatgtgtgtaatggggcatatgttccataagtagaccaggggtatcaccaatgagcgtcttaaaccactgttccctctttcccttgtaaggcatgccatgctatggtttcccagccacagacccacttctccctgtggaaggggacgccacctggacgatgggccgctgctcagccttgggggtccatgctaaccctcttgagttgctagaggctttgtggaaagacttctaaattttaaaatcttcctttaaagtgccaagtcagatggtctgataatgggactttaccataagccatagttcagaaaagacagtcgacagcctaataaaacttcccctcagatagcaagggaaagtagacagctctgcccagcctggaggagaagcaaaggagagagaggacaaaggtagcaggtagacaagcaaggcctctcctgcctccctttcttgggatgattatctcagggactagggtgtcagtaacaaacacagggagttggggaggggtctaaaacaatctgggttagggctctgcttttctgagacatagtttgaggagaatccaagtctcctgaacttatctggcacagatccaacatggtgccacaggatggtttaggaatgacagagggaagtgactcagtgtccaggcaaatgggcatgagacggccctcctattctcacagcttgcttaggcatctaggatatgcctgattcctttttggcccccaacacagtaacacaaagtgctaagagaaggcctggggttgaacaggccacagttcttctcaaccttccattctaagtcaaaggagaagaaatacagctaatacactcactttccaatgctgttcaattccatttgatggagttcccacctgccttgaggaataaactgtccttcaagtttaattcattctattccattgtggtacacacatcagattaaggtagatactgggggactccagagatggggacaattccacagacactgtgccattgccttgggccttcagagctccgagagggttagcccaggcattgttctctcatcctatttctaatggtctttatcttctccctgctcctccagcccagccacatcctcttctcaatcctccatctccacctgcttcattcaacctctcttccatcccctgcttctgtgagccttggagtgcttatggcagtagtcaacctagggcagatagggccaggccttgaggctatggtgagaaagtcagaaaaatggaactagaatgataattggggtggaacatgaataataatacctactatcattattactattatttcacttataatgattcttactatgtgccaggcactggtttaagcattttacatgtatagtatgagctcatacacttgtgttaactcatataattaactcaactcaaacgcatgagttcatactgcatatgttacagcctatggggtaagtgcaactatgatcccactttagagacgaggaaacctaggcacagagaggttaaagtgccttgccctgggtcattcagctggtacatggaagctagaaccccaccacagcaagctggctgtagaccctcatagtaagccacatttggggacaccaagcaagctagaccaaggcaagtggctgcatttggtttgggaatgcaagctgacccacggaggtcccagaggatcagaaacaatccataataacttttaggagatttgctagaaggcagggagtttagagtgtctgtggctcctgctttgtagttctggaaactaaagccggggagttagggctacgtgacatgcctgcagttgcaagaagtagctgcaagagagtggaatttgcatctgcactgcacactaggtggggcagagccaacgttcaggaaggtgtacatgtctacacctgcacaggcgcttctggaggaggcaggtgtggcaagccccctgctgaggaatccagccagggaaggcatcctttgtcttgctctggtggctttcaagcaaagagcccagtgtgttttgcaggcgtccattcatgagcttagctcctgagctgcactgactggatgacgggcgtccccgcccaggagccagagactgtgtctccacatgcaggcagggccagcgtgaggtcaggattaaccagagaagctgtgctcttcttgcagcgccacactaggctgggcggggggcctgctgaagtgactggtccttggaagcacaaagcgtggagctcccacagccaaaggccccagaggttcatcatgaggggcttgtgaggggagccagctatgctcccccctgtcatagatgaggaaactgaggctcaaaattaaagctggaaaatgatttctggaacctcaaatcaagtctactgtcccctattccaggtctatcttcccatataccatgctgttttgggtacctatgccatttaaaatatcaagcagaatggggacttcttgagcctaaatcaggctcaccctggggaacaagttcagaggaccccatcagtatccagggcagaatattcatttgcccagtgatggatgcatttgggccccgcttggaggcgggagagattccttgcgcaccctgctattgcactgctgctccggcccgggcctcttcacattggacataacattttcatacgtgctccctccagtatgtagtgtctcttctcttccaagcccctctcctttagatgcccactgaaaacccatctcctgtaatgaaaccacaactatcttcctggaagtaaaattacatcacctcacccgtttgcccttttgctcctccttggttctaaaccctgtagttctcaactcagggtatcttgtgaaaccttgtgtcctttattcttgggcatggcttcagcgtgggtgtcctcccccgtatatactgtcttacgtgttgaggcatgtttgtggttattttgcccaagggaagacaccatccgtgtagtaaggcattggcgtcattccagtggcttctggatctagctagggccatgatggtgtcagtccccatgctacagccaggtcctcttgggtaggtgttactgctgtaggcctctttgcagggccccattgcaggctgataagatgccatccgagtacacagaggtcttctgcaggctggcctttttcccagctcttccagctgtgtttttccccctacccaaatgctccagctccacctccacctccatagtgccatgaatactggctccctttcccgtgccaggctccgtgctaagcattcgccatgctttatctcgttaacctgcactacaactttaagaggtggatatttttatccacattttacagataaggaatatgagactcagagataaaataacttgcccaaggttacatagctaataaatggcggggcctggatttgaaccaccacgttcttaaccgctgagctccaccacctcgttcagtccatgtcggctggtccatggcccatcctcagagacgcctgtttttgcagtgaacaccccctcaagtctttgacaacacccttacctcctcggtttacccttgtgtgccctgagccaaatctgaacctgttgagcttgatcaaagaatgaattgttatttgaaagagaaaacaaaaggtgaggatgactcactttacgctcttctttgagccactatttattgagagctttctgtgtctctagcactgttctaggtctcacattaaataaaaacccctgccctcacagagattacagtctagtgaattaatagcatgcctagtgctgacaagctgtaagaagaaaggcccatccagaaggaggagtgagggccctgggaagtaggggggtggctgcctccctgccctggcagctgagggatgacctgaggcctcagcttttcatggggatgggtcttgttccaaggcagagagtgctggtgaggccgtgagggtttcaggggcacagaggtctccaagccttctcatttctgctggtggtgatatggagccctaggtctaggcagaggcagtccatctggaactctagcttctgtggcatgaaatggccttgttgaacatgatagtgtatacagattatctccaattatcagtgagtgaaggagccctttacgaaattttaattcttcccctgcccagatgctccagctccacctccaccttcacaggaatcataaccagatttcctcttctgacccacctcttcccttctcccttctccctcctccctgcccctgcccccaccccctcaaattggtctggcctaaggccatgcagagtaattaacctaaacccaacaaatataattagaaaagtaaatatgttagccaaagcagtcttatactatatttcaaaatcaaatgtaagtaatgtaagtacacggtgggaggtgcaaaggcttcccgagcaccaggtcctttgcacctatcatctccttaaactaaccctcactgcaaacttatgatctaggctttatcctccccattttgtaagtttaaacaaacaaacaaacaaacaaacaaacaaaaaaccccaggcttaaaaaggtaaagtaacattaccaacattacataaatgtcaaggttgagtttttaaccaaagtatgtctgacccacaagtctgtggtagttctgttcccatctagtcccagggcagccatttatgcagaaacagtaaccttgggcaaactactttaccttccactgcctcagtttcccatctgtaaaatgggcccaatgctgatagctaactttcccctcaacctcagttctgttctggtgatcacatgaactggtgtctaggaaaggccacagaactttcaggtactgtgaaaatacagtattaatcctacccttgaatttagaagtgattatggcttttccaccatttaaccttgttggtatccagttcagcatatctggtttatttttcacattcctgttctgagggtagtctctggctgctgactgtaaaatctgtgttgctctctctccaggaattagcatctcctcttccacagctgtacttcagctgtacctcaggcccctgattgccaagttgtaggtgttctataacgttctttcttctggaatcccaagcgagtagtccatatgcacttctttccagtagtgtgctggtaaatgtttaacagctgggtttccaattgtgaatctgatgtgaatgttggttaataattacatctacaataataagtaagataaaagtgaaacaacaaagacgcattttggaacttcactggttttttttccatatgagccacttttttgctgaatcaggtaatcgttttcaaaaactagaaaaatattacctcaatatattatgtgattcacaatgtcactgctacagacacggcacacttttacgtctaatcttactgtattaacattttctctagcacttccataagtctagataatcaacacaacaataaatcaagccctgagtatagagtgtgccaatttctgtggtgtaaatattctcaccacggccaatttcaagctaccaatgtgatgttactgactgtggaattgggaagagagtcagtagtatactacgctacagtcttcccaccatatgtgtaataaacataactcaagcacatagatgatagtaaactgtagtttaaaaaaattaggatctgatctgttgttagtatttattacctttttaaaatataattaattatatgtttatatcatttaatttttaacaatggctgtgttccacagccagcttgcaaaattcctgaaaatttaccaatcagctttcacaagccaatgcaagcttcagcacaccaccgtcccgttcctcttcccgttagcccagatgggtcccatgctatctgatggccacaccctttgttaaatagctccagttagtcctgatccacgcaaatcaagagaacattagtcaatgcccagtttctccaaataaacaacgtcaacagcttcagtccagtggagtgacttaatgatctgtttccttcaataaactgtgatttctgaactcaattcagatacctgagcgtcgcagtaagctgagagtgaggcccagaggcgttcataatgtaatatactaagtttaaacttggcaagcagatgacattgtgagaaatggctttttttaggccgattttgggagtttggggtgtttttttaagagttaagccaaggcaaaaaaataacccttgcaacacatcacttcacagctggtcagcccaggagaggctattctgggatattcaagctaaagaacctctttttaaactccaggcaaactggaatcaggatgcagggtttttatttttgtctgtcatggatttactctgtccagtaatcctgtacagtaatctctgtccagtttgttccctgggtgggcctcagtttaccttctggagaagtcaagtcagctgcctttacctagggcattattcgatttttgaattgtggagactgaaaaaagatagttgctagggtttatcagagggtttggagtgtctactcgaggtgttccaaatcagcggagagtcagagaggggtgaagttgaagtaggatcttataagaaatgacaaatgaacaagatgtaagagagaggaggaggaagaggaataggaaggtgaaggaggaacaagggcctccaagcaacgtaccatgaaaacatcgggcaagtggctaaactgtgcgtccagtgttcactttgctaagacggagagtgagggcataagatgatttagttacagaagaaaaggcaggcaagatggagcaggcaggtgccttttgtctgggtttgacaagagagtttcctgggtagggaaggaatgtgatcaaagttatgattctaagacctgcctggaagatgaccagggagtgggcaaacttggaagcaaaaccagcctcccaaacacctgtgtaatatcgtgtcctgggccactgtataaataacctccctcctgttcatcagtaggctttgtagttctcagcctctctcctctgttgaaagtgtgagccagccctttgcatgaagaagcattagaagggatcactgcatacttctttaattgtcaagaatgcatacatgccatgcatatgaaagatatagtggactttggggactggggagtggagcaggttgggagtggggtgagggataaaagattacaccttgggcaccgtgtacactgcttgggtgatgggagcatcaaaatcgcagaaatcaccactgaagaacttatccatgtaaccaaaaaccactcgtacccccaaaaatattaacattaaaaaaaagaattcccaccgtgccttaaacttatgtcatctcactttttttttgtcagcagcctagagggaaggggacacaatcccaattttaacaccaaagcaactgagacctacagatattaaattacttgctccagattacaactgagactcaaacccatcgcctggccacaagtctggtgccctatctacaccaatctgtctccggtaaacctaactagctagtcaacttttcccatccataggccagacaccttttgaaataacaaaccatctgatctctagaaaaactgaaaggccagttccagttgtcagacacaccaagctcgagagagtctctcccaaaagttctctggaaagcccagggattccgaattccaaagccagccaaatttgaatttcctctataaagagatagtccctcctggtttagaacataaccttcctcattaggctggttccatgttttgtaataacttttgcttacaccacaaaattgtcatagattacgaaaacacaaaggccttggaaaaaaggcccagagccccctggaagtcattatttcttcctttagcaattgctgagttaagcaccataaatatggttcccatcctgctccccttcccccgccctccccgccccccacgatcagctggacatatgttaggaagaaagcagggacgtgggggtggaagaagattcgcatgtcgtgaatcttgagcactgaaaagaaaaagtggggagagggcggggagtttgcagccctggaaatggaatctctgaaggatttattgcctttgagtatctcacaaggcttttttttttttaataaaaatctgtagcttatggcttttttttttttttttttttgtatagggcagtaaacaagagctctgaaaggggaaggaagccaggagaaagccagctccattagtcacgcagcagcatatcctgtcacaaaggaccccagttgagtaatcgcccaaaatatgcctgttatttttttctgtcagaaaaaaaatggggcctgccaaaacgtactgtaaaaaaaaaaaaaatctggtgtcttaggcccagagagggaaaagaaaataaagaagaaagagtcataatttcacagtgctcttcaaaccctctccccagcttacctggaaaagaaaaagccttcagactcttcaccacgacagagcctgccaggcttgaagaaagctacagccttgggatggtccagttctcagagtcttcatagttacttggtgccaagagcttaaaaagaggaggggtggtcggggaaagttgaaggaggacagcacggggggagagaaaaaatgaacagaaagggacccaggatattgaacaagtcctttgacgagctttaaatgggtgaggcattgctcatagggaacccgcaggagcccacaccagttccatgagtattgcatgagcccagcaggggctagtgacttccagccaatggccgagcctgcttcgtaagcttttctgatggccccagcaaaaccagcactgtctcaggcctccaccatgccctgtgggtgtttgggccacagactggacaacaaggacttgtgcagaaggacatcggactctggagaggtctgaaacaaggggtggggagagacaggctggtcagagctgcctgcaacctcccgtattctcctggattggccttccaaaacccgggctgacaggctcttggtaggaaaacaggcccagcaaacaaaggtgttctcaagcccagttcagtcactgcctctgtcccatgctcttagtctcatggctctcaggagcaggacacaagagacggttatgcccaagcacagaacactcttggaaagccatcctttcccttctgctgacattctgaccccctcaagggttgtccatggggaacaggctttctgcacccaattgaccaaaaaataacagaagccttctccttaagaaagagagcaggccagacacagtggctcacgcctataatcccagtgctttgggaggctgaggtgggagaattgcttgagcccaggagttcaagaccagcctgggcaacacaatgagacctcgtctctacaaaaaaacttaaaaattagccaggcatggtctcagctactcaggaagctgaggtgggaggattgcttgagcccaggaggctgaggctgcagtgagccgtgatcatgccactgcactccaacctggacaataaagcaaaagatcctgcctcaaaaaagaagaaagagaacagagccctacagagaaggaagaaggcaggcacattgtcacttttgctctcaagctccctggatctctcctagaggagagacccccaaacctgcctgcactccgcaggagctgactgggggaggaccctttccagggacacctccctggaggtgctctaatatttggctgcttggccattctgggccaagaagactccttccctagcccaggaccattagtctccctgatgattgctgcagaaaggcccaattttcagggccctacctagcccttcaatacctttgagccacccatcttgtctgagccagagtcctaaagccagtcctgagcttcaagacccatgcttgccctggccactgcttcccctgggagagctgcctggcttcctgcagagagctggcctgcaagttggaagggcatattctcctcccggctccctggctaaattgctatagaatttcaggtcactcaagtgaactttctgtgactattttttcctcccttcaagatttatcaactattaattggagcctctagatgcctgcaatgtggaggtcctgagaattcaatacagaataatacaaatgcagttcttcctgtgaagcctggacaacctttcccttccttccttccttctttccttccttccttccttccttccttccttccttccttctttcttgagtttcctgatgccagctcctcagatggtgagccagcggtgggaaggtagtggtgggggtgattataaatacaataagaaataaacccacacactgcaaaactccatgttaatactattaatagtatttccaaattgcatacaggtagaagacagttccttagcaacatgatcgtaatgagaattccacaagggcatctggaatttactctgtcagacattccagcttatcaggaaatgaaaaggaccaagactatcatataatgtgcaaactatgctaatgcctatcactagtgtatatcagaccccagttacaggactgacccatgggactccccttgtctcagctttaatcacatgaagtacctgaggcctgttgtcctcctcggggctcaatgccttcttgcggccaggtccttcgtataattcaagagttgaaatcactgtcaacacagccctttgactaatgttccggggtgacaggcctggcacgtgaacacatgagtgatgctattatcccccaaatcacaggtgagtgaggtctctggagatgtccacccccacatgaatttccctttgtggtagcagtaacatctgagtcactaagcatggggccacaatttaggctcactccctccccttcctgtgccccaaaagggggctgaaggcgggtcctcacagcagaaaaagctccacttcctccgagctccagacagcacatctcagctgtgttgggccttacaaggctgcggtcaacaggcacccaggtgatgaggtctttctcagcctgttgttctcttgttagccctttgatgtttcaaagctgacgaggtcagcatcttccaggctgcaggaaacatgcctgccaggtatacctttcaagcagctgattaatatgtcatgtggtctctggtcagaggagagtgtaagggctgttgaaatgactcaccagctcagctcccgtgtctttgggaaacgctaccctgtcagcaagaggcctccagctgaaaagtaaagacacagatctgaaagggtacagttctagcgtccaacaaactattatacatcctaaatgaagtgagaaatggtaggctcttcacctgccagggcctggcggggcctgtgtcccaggactgcttaggaatccaagcctcgcactgtttatccattatactgatgagaagcctgtgagacagggaggcttgctgggcctccaaagtccacttgctggcttgttacttggcaccatcagatctacgctagggatggtgtaactagagcctttgagtgcatgaaaagtctgtggcctgacaaagcacttactgaccaaggaaaatcaacttcaggtgcagcaggaaaggtctggtacccagaatgtctggggttttgagacactggaaaagattgcctaataatgtcatgggctcccttccctggaaataatctgaaaataggataagttccctccaatcttggatgggtcaacctcgtcttgaggtaaggagacggttacatcaacccatggagagggcctgtcagcaactctgagtctattagagggtatattttcaaacacaaaaaactttttatcctggtaaaatatacctaacgtaaaagctaccattttacccatgtttaagtgtacaattcagtggcattaagtacattcacatcgttgtataagcttccccgtcatctctctccagaactttttcatctttccaaactgaaactctgtgcccattaaacactgactcctctttcccctcctcacagcccctggcaactaccattctccttttcatctttatgattttgactactctaagtaccttgcatacgtggagtcacgcagggttcttgtgtgacgggcttgtttcacttagcacaatgtcctcaagtttcatccatgttgtagcatgtgtcaaaatttcattcctcttgaaggctgaatactattccattgtgtgtgcatgtgcaggtgcatgtgtgtgtgtgcgtgtgcaggtgcatgcgtgcgtgtgtgtgtgtgtgtgtgcatgtagcacgttttgttcatccattcatctgtgatggacacttggttgtttccgccttttggctattgtggataatgctgccgtggacttgggggtacaaatatctgtccctcctttcaatactatatccagaagtggaactgcacaaagaaaactttaaagacaaaagcattgtgcccccagaagaaggcatgtcgatgtcctcacatcatgatttcatatggagaagaaacacctaaaaaaagttgggcgggaggccgagatgggtggatcacaaggtcaggagatcgagaccatcccggctaacgcagtgaaaccccgtctctattaaaaatacaaaaaaattagccgggcgtggtggcgggcgcctgtagtcccagctactcgggaggctgaggcaggagaatggcgtgaacctgggaggcggagcttgcagtgagccgagatctcgccactgcactccagcctgggcgacagagcgagactccatctcaacaacaacaaaaaagaacgttgggctacagtaagacttggtaagagggaccaaggaagcatggaagaaggagctggttggttcccagagcaaccagagaaggcttcacagagatgaaattggagctggattctgatgggtaagtaggagtttgcctggtagaaaaaaaaatagagaagggcaggaaaagaaacagcccttttcaaaaaagaggagaccaaacattgcatgcacatatcctttgactcggcaattgcactggcaggaattctgctgttatcctcacacacatacggctccaggcatatgtctaaggatcctcatagcagcaatgtctgcaagacttagtcactgggagtggcctgtggtccctcactaggacactgctgaaataaactatggtacagccataccgtgaattcccacacaaccattaaaaagaatgaaggagggccaggtgcggtggctcatgcctgtaatcccagcactctgggaggccgagcgggtgaatcacctgaggtcaggcgtttgagacgagcctggccaacatgatgaaaccccgtttttactaaaaatacaaaaaattagccgggtatggtggcaggcgcctgtagtcccagctactggggaggctgaggcaggagaatcacttgaaccctggagacggaggttgccatgagcagagagagcgccattgacctccagcctgggtgacaagagtgagactctgtctcaagaaaaaaaaaaaaaaaaagcaaagaatagaggcgatctccatgtgctgatatgacaagaattccagacttatttttaattaaaaaaagaagatgtcactgtatgcccaagttatttccctggaaggaaagaacacacaagaaactcttaatagtcattacctttgacaggagcaactgtaacttgaggggagagaaattaaattttcgtgttatgctttctaatgtgtatgtattgcgtttaaaaacaaagttaacaaagctgccaggttgatgagattacggtccacttttacattctttgtgctttttctaatttaaaatatttttttaaagaaaagcagctatttttctggaattgtttagtcccaatggctcctaaaggcagagagatgagatgtttacagggccatcctttcggagtttctcttacagcttcgcaaggattcctttcaagacagaatggtatcctcatctcctcgagagaaaagttttggggccaaacaagaattcggccaaaagctcggggccaggcatgtgtggtgccagggcagtgcgggggttcccacaatgtctgtccaactgtcctggggacaggacccctcttctgcacttttctgtacccctcgtggggactacgtctctgggacaaaaacccagctacacagggttaacccctgcgttttgcttcgctgagcatggctgaggaggagggggtgcggtgagagcagagggggctccatcccgccccagctccaggcagcattaataaaatgcaggtgttttgtgtatgtatagctgcttgagggaggagggagaaagagccttgactgcagcagcgcatagaaacaagagccgagtgcagtagaggaaaatgtgcctgcaagtaatgagaaagcattttgcaaagacagccttggctttagggttgagaagaatgcagcagtttctggcacaggcctaccctgtagctccccctgggtgtgtgtgtatgtgtgcgtgtgtgtgtgtgtgtgtatctggacacaggatcctatgcatgcatgtgcacatacacacaccccaccaccaccacagatttttttcccagcaacatctcacacaacctaagtttgaccctcacttgctttgaccaggagttggttctgacactcccttccctccctgccaaccgccctccatcttttctctcctgtcttcctctctgtggaccccacaccctgcaattcctcctttcccccatcacttccttctctctggggccttgggttgacggtatctccccttggccagcccctttttcgtaatgccacttggctctgctttcaagcaggcaccttgtgaacccgactcccaccctcctttccaaagcccacctcccttgcagtcgggaatggagctcaggaggttggccagcccctgctgctttagcttgatgacgtgctccagcactgtggaggttcaaagtgaggggggagtaaagcacagagcaagccccctcctcctggccaccccaagggcaggagagcaaggaggaggcatcagagatgactgcaaagtgggcagcagatctgagggccactgggccctgctgagggtcctctgtccccacctccccacatcccccagggaggtgggaagtgacagccccccaacttctagagggtcgccctccattacgccaagttaaagaagcctaaaagcaagtgatttctgtgatttctttagtttgcctccttgcctgagacctgctgaggagtgcagttgtaggtgagttgttctgacaccggaaaggcttcaggagaccagggtggacccctgaggccctgctcggtcccaggcaggccagggtctgagtggaagtcacaagtggaggagctcctccagaggacatgggctcctgattccatgaggagggggtagggagaggtgctggggggctcaggaagcacccctgtcccaggctaccaagctgatcctgagtgtttgtgtctgaaaccactgagccagaacccatgccaggcaaaggccagcccaacagcatagtaaatatgttccccggaatttagcactcctgagtcagaggggagcaggggctggcaaggaccctctcctctggcctgtctgaaatgggaggaccaagctctagagaatcaagtttttactttctcaactcctatcctctactccctacctgcctccccattcctctgcaaataaaagacagagcaggggtggacaggcagcagcccaaccatcccgccactcatccgctcatccctgcccgcagctcacaggctggctggcagcagctgtgtcaggaggcaggacccacattcggaaactctgaggaatctccttggagagtagttactggggccgcttgtcccagaccccgaattggaacaccgtctctgacaactccaagactgggacttgtcacttgcgggaataacagtgggaaccaccctggaaaatccaggatgcagggtccccttactagcacaaagcagccttggggcccctgtgcccccacacccagcccttcctcccttctgggagcggaacgcgggagaaagccttgcatcctcagtggccccccaccctctgaaaggcatgtagtggcctcaaggccttattcccccctccactctgttatatggagcctatgaggagcagatgtttctaatgaagggcccaggccagggctctggaggtaacaggcccgccatagagcgctggctcccatggaggggccgcagcccccagacctctgaaagcacaagccgcccagtgaatgggacacacactctcttgaattctcagctcctttcaggaaattgccaagttagcccttggctttctcctttccagtgcccgccccgtttccatggcaaccgcctccccatcttccagagcctctctccggtcctgcccgccccctcctctccaccaccctccgcgtctcatctgtctgggtgggaaccgggattagagttcatcgggccgggatgcttttcccagggccgctttgccttcgtgatccctttgcggcagcccggcccctgccccgggcttttcaagtcccccagacttaatgaccagccctgggtttcctcctcttctctttctctgcctccaataaagccggagaattaacccaggttttaagtgccccggttccaagctgaatatcaaagggggcttccccaagctgcttctgcatttcaaaggggctgatttatcactttcacttaaaccggcacattttggggaaagagttttacccagaggtcaaactctggaaaaacaaatggatccccgttcaccccctcctggggtgctgtgggctattagtgtataaactgctggcgggtaggtgggaaacaggctacccgcactcctcatcagcctgggcccaaactgttcctgtgcccccggggcgattgtgaggaagagggggaaatgcatggaaccatggctgagaagctcccacactgctcctcctggtctctgtgcctggcaccgggcaagtcgtcagctctgtttctgcttcctgggcctcttgtggaggccctaacctgaacctgcattaacacttccaagctaagggtgctccctgccccagggactctgccccttcaatacagccagggcctgtgagtccagattctgccttttcttccattctgcctgcgaagcttttgcaggcacttactattcaggggctgcagagctgggcccctgagccaccctcactccccagctctctcctgccctcacagtcaggccttgtccatacccttctttcccacattccctccccacaaaacatgcacacacacattcacccaccctctcccagacccctgccgccgcccccagtctccctctcatccaacctcaacccaataaattatctctattattgccccttcctcaaggacttcctcatacccccacaaagaatgctggaaccccggaccctggaaacttttctccctctctgtgaagcatctgtctagctgcccccaagcagactccagcctcactgcagagcgtgaggtccttcgtctgatttagcccagatctgattgattcccaggctttctcaggcattaacccccaaggagagatgtgcacatctctccttgaagtgaccagaaaagccaggagccagcagccaatgaagcaatccttggaagaggccaggcagacagcacagcgttatcgaggaacttcttacttagcacgaaggggcaaaagcgggcgaggcagcaccccaaagccagcttccagagaggacatcctgaatgaggtcttgagaggcaccaatcacaaggcaggttttcccttaatggacacatctgtttccttttcttaccctgccaccagctcattcattctttcacacattcattcactcctaggaccatttactgagtgcctatctcgtgtcaggggcattagagagtaaggctactgttgattacagtgcaatgagataaaccctctctcccgtaaagtggccggcaacattcatggtctttgcctaaccctctccatggggatccgggaaatactctagacagggggatttgattccagcttgaaaagatgggcaggagtttagctgagagaaatatattccaggcagagtgagcagcaggtccagaggcacccaagcccaccataggtggtgacgataggcagatatgtctggcacataggaatgtggagggaggtgctaggagatgagcctggaagggcatgtgaatgacgttgtgaatggcaggccaggaaacccaccacctctgccatgtcacccaagttcaaccccaacaagatcaaagtcgtatacctgaggtgcacgagtggggaagtcagtactacatctgctctggttcctaagatcagccccctgggtctgtctccaaaaaaggccaatgaggacatcaccaagacaagtgactggaagggccagaggatcccagtgaaactgacggtgcagaacacacaggccagattcaagtggcatcttctgcctctgcagtgatcatgaaagcccttgaggaaccaccaagagacagaaacaagcagaaaaacattaagtacagtggaaatatcatttgtggtgagatcatcaacattgcccaacagatgcagcactgatctttagccagagaactctctggaatcattaaagagatcgtgaggactgcctagtctgtgggctgtagtgttgatggcgccaccctcacgacatcacagatggctttgatagtggtgcgggtggagtggccagctagttaagggctacatatagaaatatttcaataaaggatcatttgacgaccaaaaaaaatttaaagagagaactgtactgaagaaggtggggaatgacagagggagccagtcagggcccgggaacaagagcaagtcaaagactgtgttctagcactcgtccgcctgctgaacctcatcacgagcttctttgctgcatgtgctcagattctgtctctgtttaccctttccacctggggaagcacggagctcattgactcttccgcaggagcccttgctgaagaaatcatttgtcattctatctatccgcttagattagctgggaggttcagtagaacctgcaagcttctctctccctggagggaggcaagggacacaggggaactttgggacaactacacagggcctggcaatatttgcagacaaggggatgggagggagcaggggtggcaagagtgccagcaatgctcccagggccccacaccagccacaatgcagcctttggaattttagagaaggagctcccaggggagagttggactagagtttcagagtctctctcagtgcccacattttgtgatgccactgctgatgctccaaagcagagatgcccatccagttgcatttttaagctgctgcaatgcagtaaacttccctggccaagccttggcaaaccgtctgtagcaggactcccatttcttccaggctgtccgcagagcagattttcctaggcatgggactttgaaagccacagaaggaaatggaagacaaaagaaagagcagagcaggggagccaatggtcccctgagtcttcatgtttatgaggctacttgggacctaggagttcaataacctgccatccacacatttcacacaatacaattgactccgtgcaatagatgtgttcccagaagctgtctgggaacagctaaaatttgagtaataattttatgtggtgttttcatacaatttggataatctggataattgttacatatcgtggtttggcttaaagccagggttacccctaacaataacagaagtgttgactgcttggggcctggcacctcccacttggacctgcggtttgtgaaaggctcctcctaggtcttggccccctacttgtcttccctggagtcttctgtcctggtaactgctccagagtcatcctcacagcgtcttcctccacaccctctgttgagcacccaaagctcaggatgtgccacaggaagcagggagagaagacgccaccctgccttcaaggagctcccctgggagctgggtctccccagatgcatttctggggatgtctgtgaagcccatagctgggcagcccagaccgccccacacaggaggcgctgggctcaccagctaagggtgggagctccacctggtcagatcttgctccaggtcacttttaagattgcagtgcaggcactgggcactggcctgcccgaagcctgccttatccagggactcatttcctggctttgcttctcctctacccagcttatgagaggagtgctaggagagggagggaaaacagaaatctaaacttgctcaggggtcctattttgtatcttccctctgagcttttttggtttcaaccaaagcatattccccctcttttctgtggactcaaaacccatgcccctcacttggaccgggccttcctcttcccgctttgtccaccagcctcaagtcccatgatagaatctcctggatagtgtttctttaactgggctcgagccccacagtaaagtcttggtcctccgccggccagagcccacatctctgattcagcaacaggggcaggtgttcagggcaatctgggttaggtccactgaaaaccaaaggaaataacattggtctgattcaaggccttcagaaatgagtcagcccccgagcccatcaaccatcactgttactcaacatcacacccacgttattcatgaagtattgtcttcagcttactagacaacagagccccaccagactctgggaggctgaggatgacttattggtctgctgtgggctcaacatcaagtacataccttacctctgtccaaaaactggagtggaagagcgctgagtcaggaaggctcatgccccgaggcgtcttcccacaagcctctggtcaccctgaacagtctgttctggatttcacaccttggaaaaaagtcctctatgagtacaatgagtggaaagagtcttagaggaagagttggggccaggtggccaggtatgtgcagcacctctgcccagccctccttggcccacagtcttaggctggtagcctgcatcctatgcaatagccaatgttactcttgtttttcattccttctaaatgatccaactgaggacctgccaagttgaagttggatgtgactttccttcctatggggtagagggggacttttctgggtgtagtgggaaaacactgtggccaaacacatgactctggagtcccagaggcttggactcaaagttccaaccctgccatgtaccagctcagcaagtgacttatcctctctcagcctgtttcctctttgataaaatggggataataacactgtccatctgtaagactgttgtgagttttcaatgtcatagtgcacataaatgcctggcacctcgtgagtgctccctcaacggccctgccagtgttgttgccactgttattattattttagttagtaccactctcactaccattctccctaggccggagtcttctttcacatgagacccttgtcttcctgattctggtatcctcagcacacaggcacagtcgggtgcagtgagtggtagtccaacataacttctgaaggggaggagccccagagagagggaatggcatgttcaaaggtcctgcggtgggaaggtgcatggaaaatttgaagaaaatggtatagaaaaaagtccaatcattagctacaggcccccagcagctgctttagccaatcctccaacctcctcattggcatggcaagaccacagaagcctggagccctgatacctactccagccctctgctcctctcactgaccaggaaacttcccttaagacagaagccctaaggtcatctgaaccccagaagacccaaggaagcagaaatataccaaatgaagatcctgaggcctttgtgtttagttaccataaaaaaataagtccccaaacctggctatttgtacttggcattggataattcgaaggtgattgaggaaggtactggggaaggaagcccaggcaggggctgtggttgccaggtggggagggaagactttgcaaactaacccaaaagcaagcatggggtgcgtgcctgtcttccatgtagttcctaaccccctgcccccaacacgcccatgatgcatgggagcagcccagtgccaccaaccacactgaaggcttatcctccactccatcccgctcttctccaacctcctagaaaactgtctctgttcccatccttcctctgcaagagcctccctcaacttaagctattagccctcccaggagcacttgcatttaataaaaacgaggaccttaacacttcacaggaggggcttattaatggttccctttctggcttttggaaactgcagggagcaaggtttctgtagcagttggctgagccctcagggatgggaagacagggtctgatgaggcagaatgccagttagggaccaggcccaaggtgggtctccccaactctgtcttatgccctataacctagctaccctctgttggtggtggtggcggtgttggtggtggtggtcaggtttgttgaaattaagtgtacatacaatgaaattcatccattttaaaatacagttctttgagttttagcaaatgcatgcagttgtgtaaccatcaccacaatcaagatacagaacagttccatcaccccctaaaattctgcagggcttcattatagtcaaccccttcccccagccctagccattgaaaactgctcatcaggtattttgacccattagttttgccttttccaaaaggccatataaatggaatcataaggggcatagcacggaatctgccttctttcatttagcctaatgcacttgagattcgtccatgctacctgtatcagaagttcgttttcattaaccccgttaaatagtgggcaaaggacatgaacagacacttctcaagagaagacatgcatgtggccaacaagcatatgaaaaaaagctcaacatcactggtcattagagaaatgcaaatcaaaaccacagtgagataccatctcatgcccatcagaacagcaattattaaaaagtcaaaaacaacagattctggcaaggttgtgaagaaaaaggaacgcttttacactgttggtgggagtgtaaattagttcaaccattgtggaagacagtgtggcaatttttcaaagacctagaggcaggaatatcatttgacccaggaatgccattactgggtatatacccaaaaagaatataaatcattctattgtaaagacacatgcacatgtatgttcattgcagcactattcacaatagcaaggacaaggaattaacctaaatgcccatcgatgatagataaagaaaatgtgatacatatacaccgtggaattctatgcagtcattaaaaaggaacaagatcacatcctttgcagttacatgaatgaagctggaagccattttcctcagcaaactaacacaggaacagaaaaccaaacactgcatgttctcacttataagtgggaacagaacagtgagaacacatggacacatcagggggaacaacatacactggggtctgtcagaggtggagttgggggagggagagcatcaggaagaatagctaatagatgctgggcttcatacctaggtgatgggatgatctgtgcagcaaaccaccatggcacatggtttgttgttgttgttgtcattgttgttttgagacggagtctcactctattgcttaggctggagtgcagtggcgtgatctcagctcactgcaacctctgccacctgggttcaagtgattctcctgcttcaacctcccgagtagctgggattacacgtgcctgccactgtgcctggctaatttttgtatttttagtagagacgggtttcaccatcttggccaggctggtcttgaactcctgacctcatgatccacccgcctcagcctcccaaagggctgggattacaggcgtgagccaccgcgcccagcccatggcacacgtttacctgtgtaacaaacctgcacatcctacacatgtactcctgaacttgaaataaaagttgaagaaaaaaagaagttcgtttttggccaggcacggtggctcatgcttgtaatcccagcacttcgggaggctgaagcgggcagattgcctgaggtcaatggttcaagaccagtctggccaacatggtgaaaccccatctctactaaaaatacaaaaatattagccggatgcggtggcgtgtgcctgtaatcacagctacttggaagactaaggcaggggaattgcttgaaccagggaggtggaggttgcagtgagcagagatcgcgccactgcactgcagcctgggcgacagagtgagactctgtctcagataaaaagaagaagttcgtttccattgataagtagtgttacagtacatagatgtgtaacagtttattcattcagtaatagaaggacatttgagttgttcccagttctgggccaccatgaataaagccactataaatatttgtccacaggtttttttgtggacagaagtttgtatttctccagttaaataccttaaagttatattcctcacttatataataagtatatgcttaacttcatatcaaactgccaaattgttttccaaagtggctgttctgttttgcattctcaccagcatgtctgagagttccagttgctccacatcccccgccccagtacttaatattgtcagttttgtgttttgaatgtttttttttattttatccattccaaaataataatagtggtttctcattatgatttaaatttagtgattaattatgttaaacaccttttatgtgtttatttgctattcatatttcttttctggtgaagtatatgttcaagtattctgccattttttaaaaaatggattgtttgttttcttcttactgagttttgagaatttttaatatattctagacacaagtcctctgtcagatacagattttgcaatattcctcccagtctgcatagaagatttgtcttcttactttgttatcagtgccattctaaaaacagaaggttttaattttgatgaaatccaatttataaatttttcttttctggattgtgttttcaatgtcatatccaagaaatctttgcctaatccaaatcagaaagattttctcctgttttcttctttcatgcttttaggctttttcttttgtactttcacttatgtttctgtatttcacattttaacattttacatttaggtctatgatccattttgagttataggtcaacattcaatcttttttcctctctctcctcttttctttcttttctttttttctttttttgcatggatgtgtagatgctctagcatcattttttaaagagactatctgccatgctctgaatgtatccccacaaaattcatatgttgaaacttcattgccagtgtgatagtattaagacttatggcctaggccaggcacagtggctcatgcctataatcccagcactttgggaggccaaggcaagtggatcatttgagaccagcctggccaacatggtgaaacccctatctctaacaaaaaatacaaaaattagccgggcatagtagtacacacctgtaatcccagcaacttgggaggctgaggcgggagaatcacttgaacccaggaagtggaggttgcagtgagctgagatcgtgccactgcactccagcctgggcaacagagtgacactctatctcaaataaataaataaataaataaataaataaataaataaataaataaaagagttagggcctttaggaggtgattaactcatgagaacagagccctcacagatgggattagcacccttacaacagaggtgtgagggagctgttggtccctgttgccatgtgaggatgcatcaagaggcaccatcttggaagcagacaacagcccttaccagacaccgaatccaccagtgccttgatcttggacttcccagcctccagaaccatgagaaaataaatcactgtttttataaatgacccagtctcaggtattttgttacagcagcaggaacaaactaagaccccatctgtctccagtgaattccctctgtactttgtcagaaatcaactgactatgcatgtgtatttctgcggtctccattcggttcttctgttacaaatgtgtatcctttcaccaattccactgccttgttcactctagctttatggtaactcttgaaaccaggtagtgcgtgtccacctggtctcactgttgtcagcccctgctctatgaggctctcctctttcctgtggtctttcaggccgggcggcagaggctggacaaagctcagggccctagcatggccttgcaggcccttatgatgcaaacctcaccagctcatcttctgtcacacctgcctcctaggaatactgatgtgctgatagttctctgcttttgtctagcaccatcaggcctccaagcttttgcctgccctgtcacctctgcctggaaggccccgtctttgggccccgcaccacccctttttctcttcctggttagcttggatcattcttcaaggttctaaaaaatagatgcctcatgagagacatccaggggaacccatatgaccttctcaaaagtgtccttacccaggcaatatagtacagtggccagagagcagacctggaaaccagctgcccaggcctgaactcagaatgtcagaacccactactatcactactactagggcaagttacttcccttctctgagcctcagtttcgcatctataaaacagacatcatcaaagtatctcttttttggggtgtggtagggattaaatgagtcaatatatgtataaataaatacatgtacttaaacataaacttactataaatgaatataatagagacccaataaacttgggttgttatcattttttttttttaagacaaagtctcactctatcgcccaggctggagtgcagtggcgcgaacttggctctgcctcccgggttcacgcaattctcctgcctcagcctcctgagtagctgggactacaggcacctgccaccacgcctggctaattttttgtatttttagtagagacggggtttcactgtgttagccaggatggtctccatctcctgacctcatgatctgtccgccttggcctcccaaagtgctgggattacaagggtgagccactgcgcccagccgggttgttatcattatttaaggattgagaccccttttgatgtttgctgctgtcaagaaaatatgtgagcacagcttcttcccccactttgttaccgccccacacacactcaggcaggggtcaaggccacctgagcagctagatgcagccactgaggccccagcccccattgtagagctgctgcttctaggagccacatgccagggagcaagcagcagtcagcactggaaacaggctaccccagcctcagtctccgtgggtaccactcaggtgcccagcactgcgggaatccctgcctgaggcagcctgggctgggagttcacaccttgatgccccagggtccttggatagtgatgtgtcagtaacacttcaagcaaccagacgagctgctctgcagggaagaagcccacttgcaagggagctggacattcccccagccctgggaaacacagtcctgcttgctcttgaggttgggtccccatgagaagggggtcaagaaaggaccaagagcatcacgggttttttctagagcagaggagagcccttaaagcaaagagactatctgtacacgagagccactgaagtgcagaaggaaggccaggggaggggcatggaggcagagacaggggttcaagccccagctccccttcactgtgtgagttatttaatttcctgagctttaggctcctcctctctcctaagaggatagcgccacctcccttaaggggtacctgtggctgtatggagcaatgggagagcaaagaggaaaccctggtgcatccagccttccttcagagacggaagccacaggcccagccaggagatctacccagggtggaccagcacatttctgggagtccaagtcaatgcagacagagggctctctagggaacaaagaactgagaagaggaaaaccacctctggctcttggtgagcctgccaacctcctgcagcccctcatagcccaggacccctggaggtgagcctgactctcagccctggcactggagaaactcactcttccttgccctattggtccccatttcctttttccttgggcccctcttcttctagcctgggcagagctgaggaggacagtgggggttcaggccgccgccaggctggggagctccctgcagggctgggagaataggatggacagcgttttgccagagcctcatgggaagcttcctttcaggcagctgaacccatttcaggggtagggagcactgatcaggggttgggacattgccccgggaggaggatgaggatgtttccaggcctcggctgactcatggtagtgagtattagtcactccctcacaagaatcagcccacatcctctagtagcctcttgtctcccagaggcccctgccccatgtttacctgcctgaagctcctctcccggccgcccccacccacatccgcacagtttgggcagacacaagagccccgcatcacttttcactcgaggctcctctgagacatcagcttcctgcaggagaaatcttcagggggtttctcttacagatttgggggtcaaagactgggttccaatcgcagcactgctgccttgtatctctgcttcctgggcaaattatgtcaccaatccggactgttggggatattttccccgaagagtaataataatattatctagtaggattgttgtgacaatgaaatcatataaagtgtgaaagttcctggcacaaaataagtgatcgatgcatggtaatgaacactattattatacatcaataaaagaaaaaaggtcccttatatatagcattttaaaaataaggtaacaaaacccttggccccttggccctgtgaaactgtgggctgacatggaacaaaataaaagcaagtagagggccaggtgtgctgcctcacacctgtaatcccagcattttgggaggctgaggtgggaggatcattggagttgaggagttggagaccagcccaggcaacatagcaagactctgtctctgcaaacaattaaaaactgagcttggtgtggtggtgcacacctgcgtctgtggtcccagctgctcggggctctgaggtaggaggatcacttgagcccaggagttcgaggctacggtaagccctgatcgcgccattgcactccagcttgggtgacagagcaaaactccatctctatttataaaaaaattaggagatggggggagcaggtaaaagatttcctctattttcatccaatatcccctggctgtagaaactgccccgcagcccccactggggaggtcaggacagcagtgagcagtgagaccccggacactccagggaactgtggctccgcaggaggagcccggaaggggcggagaggccacagatgtggcttgaggataaccatccactcaggtgagggaagcccacttgagcccacctctcaaacataaggcccccatccctgctggccccatcccttctcaccgaagcacggtttctctgcctcagcactgctgacactttggacaagttattttttgttaaggggctgtcctggccattgtaggatggcgagcagcgtcctcagcctctacacactagatatctgtagcactccttccccctgccagttgtgacaaccaaagatttctctggaccttgccaaatgtctcgccctacacccccaccatgaagaaccactgctgtggacggtaggctggtcccttggtctccccaccttcatcccccacctctcctgggccttctccccacctcacccgagcctcaggcctggctgaggtgtctcccccaacacacactagaggaggcagtgccaaccagccactgcatctcaggaaggccgcctggcccagttgctgggaatcagaacggagaggctggctctgcaagccaggacagtgctgagtcagggagcgatcagtggaggagtctggagggtgaaggaggaatcagtgcctcagagaggagccaggaaaggcggagtaaggctgagacaaggccacaggtggtggtgtgtgaatcctgacctgggcactttctgcttggtcagacagtgacctggggatgccaccgggagctgaaaggttgctcagagccctagtggcatggcgctgcctcccagcaaccctgaaaagttcaggcccaggctcagccccaagaattcaggagccccaggctggatcaggaaggtgacagggactgagttcagagtctcgtgtggatctggggcctcgggcatcaagctctcagtgcagtgggttacataagtgctctctctccagcaaagaaagagaagagagccctgagaaggaggcatcaaaggaggaaactggcaagcttcacaggggaggaggctttggagccagttttgtcagatgacaaggagttcaccagacagagaggcaggtggaggaagggcattcctgggaaagggcgctcacagtccacgtacaggcaaaaggtgcccaaagaacaaggaaaggtcagcaggtccacttggctgcttcagaaaccctggttcagcccttgagtgacggggagtgagggtgaagtgggtctgtttcccatgggaaagtggctggctggcagcgtgagaataaatggccagttcacgtaatgtctcccttccccattctccccatcaatgaagttcaggtcaccttgatgcaaggtcagcgtgtgccggggtgagctagctagccatagttcctgcaggaaacctaagcccaagtatgccttggccttggtcagtttctcagggaagacaccgaagctcccctgcctgcacagtgtcacttggtagcagtcgcttggcccaagacctgcggtcaggaggcctgcagtcatgtgtttgaaatagggtctgactgcacttgctcgccctgagtacccatcatcctgccggggggttaacattctcccttcccacaatgcactggtccactgggcccacacctttcctccaggtcaccctggaaagtcaccattgctgtaagcccagccctaattaaccctagggcagggagaagatcagatcaagcaagagtacccagagccaggccctggctggaggagactccgcccccctgccctgcccctgtgggtctgtcccgtcccacccagtcccaggaaagggctgggactgtttccatttccaacctgtctgggccgctcctttcttgcccaggtggctctgctgggaaagcctataacagctgagcgggcttttcaggattggcttgatgccagggccagggcgagggatgacctggccacatagcagtcatcgcctgtgctgctgaagtgcttttcttcagaggatctcaaaacgttttaccagaaacaggagttgtcccagctatgaaaggacacagaaaagaagggtcactcactaagctgctaacagctttggcagtagaagtcttcaaaagactggctccaagggaagtaaacaacagaatccaaggctaaaattgtatccttaataaatactatctgaagttaaaacaggagttcactatttatggaaatctacataaacctaataagcacagagtggtgaatgtgcgtgcgtgtgtgcgtgtgtgcgtgtgtgtgtgcattcagggagggagtggaatagaacaagatgtggcactcactctcttcctccctgtcccttcctgtggtcacacttctcagggtgcacctcacatgagagtattgcctctgggattctgtacccattgttgccttctcctcctctaggcccagcagggcccaggtctcccacttgtgaggagacagccactgtaagccatctgtcctcttgcaagatgagaccattcctttggaatgtccttctggtcaccttcctctcccactgccacagaccctcaccacctcatgctcagttcctcacacctactcattcgtgcactcttcctgccagtcttacgtgccatcaccagattcatcttcccaaaatcctgccaaaattagcccctcatccttgtccaaaggacattgtccagattcctgagcagaaccttcaagactcttccccagactgatcttccacctccggtcctccccagcatgaagtctcctcaagatatttcattgtctgcttgctagtcccacatgtgcctggagtcttccgccctttctgcccttccagatccttcccaccatccttaggaaccagccctgccaggaagccttcctatcacaaggccccttccaaagactgttactcaggagatcgtgttacctccttgggttcaaatccagaacttctccttctcgaaaggcctcattatcttacttcttatggacacactgcctgggttatgagctgtcttcccagataaattaggttgccagatttagcaaatagaaacaccagacttccagttaaacttgaatttcaaataaagaacaacaaaaaaatagtgttagtatatgccatgtaatatttggaacctacttatattaagaattgtttatctgaaacttgaatttaactggggatcctatatactctctggcaaccttacaaagaaagcataagcatggagctttccatctccctcaggctctgacactcagaggagttctcaggacctgtatcgttgattaattatttttttgatttagcaaagactccttggctttcatctgctcttggttccaagacccagagcctacttaaatccctttggtccacttgaatcatctgcaacaaacccataacaggccatctaagagaatatcttcctttagtacttcatgttctccttaaacattcatcctcgagacacgctagcagcagatgggtttcaggcaataaaacctcgagtgtttcttgctaaccaaaggaggaaggagttctggagccaggatgcttgatttcaaatcccaagtcaaccacatgtggtcctgaggcctcaagcaagagatttacatctctaggtctcaatttccccatctataaaccggcaatcatagcaggacctacctgacagattgctgtgataattaaatgagatagtacttggaaattggtgaatacatgactcttacatggaaagcactcaataaatggcacctgacattgtcagtgatttcctaagactgccagtggctgctggcatgggcacagtctccttttgggatctctttcgctagctgctcaccaaaatagtggtcatgtgtgaatctccataagcaacagagttatggcagagtcacagaggagggtcccctggtgaaggttctccgtggggaacccccatctctaggtgaggtaaagcaagacatacagggacttcctcaagagtatggtctgtccctaattctccaattaaactacaaatcattgtcctcccttttcaagttcacatctttaaaagactggtaagagctgctctccttgatgaagcgggtggccggtttcagacccaactggatgtggacagaggaaaagctaccactggccttcttgggactctctgggtgaacctcggggattcagtggagagagatcccttgcccagatcctcctgcatcctaccaaccgatcctcagcctctgaggccaccaggcggctcctgaacctcagcatgggtggggtgccttgggcttttcaaggagactcttggtcaattcaacaaaagttcaattgccaaaggaccaatttgctaaatggcaattctttgagttcatgaaattcacaaatttcataagaattatttgaatattctccataaatatctgtttcttaacagcaatttaaagaatattcaatttgtcaaaagctcagaggcctagaatggtttagttaccttataaatatgttctttttgaatatattttaatgtgtcattttaatgaaaatattttctttttcttatgaatatatttgtaagaaatatattcatgaaaatatatttaatcaaataagaatacattcctaatgcatagttactaacacattcaggcagaacacaatcagatgttcatggagaacatagtcattgaatatgtttcaaaaaatcattgtttcaaaacaaggttttgacctattggcaaattcaaagaactggtgaaatgactcctaagtaagttgactttcagagaattggctgcttctcatgagggaaaatcaatttctgcttcttgttgtcatctgtttacaatttgattctgagaacttctagaacagtggttctcaaacatgaacgtgcattaaaatcactgcaaagcttggctgaactgccaattcttggatgatgccccaaaggattctggttctaggtggggcagagcccaggaatcagcttgttgagtacaattccaaggtcactcagacaccaccagttcccacacctcactttgggagcaagttgagcgtaatgaagaaaatggttaatcatgagatgttgctataatattctaaggtaggatttttttccttctcttagtgtgcttgaaaattacatccagccttaacactaatattgtaagataatcaaattacctacatctcaccattctttttgtgtgtttgagacaggacctgtctgtatcacccaggctctgtatcacaagtatagctcactgcagcctcaaactcctggactcaagtgatcctcccacctcagcctccagagtagctacgactacaagctcacaccaccaatcccacctattttttgtagagacagatcttgctatatggcccaggccagtctcgagcttctggcctcaagtgatcctcttgccttggcttcccaatgtgctagattataggtgtgagccaccgtgcttggcacctatacctcattatcctaacataattatcttttgcaaacagccttcaacatgcatgccaactgattgccaaaggtacatactgatttatattctaccttttctgtttactatgatataagagacatcttccactatgtggcaaaggcattgtcattatcatttctaatgtttaaataatataccacacacagatttcctataacttgcacaattagtcctctaatattttatatcttctatgtgctgtatcatttccaatttttaagcacagtgaacatcttcaaacatgtaggttttttttgcttctgttgaataatttttatagaattcatttccagaactggaattagtggtgtggtaggaatctacagtggttccctacagtgagaacgcagtagaataaggaccaaagaccattcctgggatgacatgaaacatgaatattgtaatcccctattaagccactttcttgaagctctaggataaaggtcacagttggttttacagatcaatttaaggtcagatcattgaagaagttagacaagcaggggttatgagcttcttatagaatcatgattttaatgtagcatgtggggaagacctgagacactacaggtacttaatgtgttccagtatttgatgcataataaagatactgcacttagctcattaacagcctggcataattgaattgcatcattaaatcattaacactccttgccacaccacccaacatgtctgggaactatccagaggcgtcccattgagtcctaagaccttgggaagagtagagccaactcccccaattctcatcctgcccttccccagctgctccaccagtagaagagggaagtggaggtctggatgtaaggaagaccattagccaagtctcacctcctacctagggctgcagttgtgacagtgtgccgaggaaccacggaaaaccgggaggaaaaaaactggttgctctccagatgtgtaatgtgaggaagttattctgatctcgcttcctcgaagatgggatctttgtcttattgacacctcagtaggtgttccacaaatggttgtccacagagtgaatgaatggatggcctttgcctaggctcatactgataccccaggctgcctctccctgatgtattctgtagggggcactctcacttctgccttcgccgcagccaccactggagaagtaggcacctgtgtctccatcctgggcagcgctggtcttggctttacttatctcctggatctggtgttttgaacctgacaaaaggcaggcatgtgggtacattaaagcacaaacaatgtgcagtacgtttatttgctggatgaccattccagccattccaaagtcccacttgagtggggcattacaggaacatcctccgtctagaaatctgagccctggttcttcttcttcaactgtcttctctatctcattccaccctgcttgagttctcccgcctgactgtgcaagcagcctctcccttcagacctctacctcctcttctgagatccaactaccgcagctaggaagtccattgtaaacccagaaccaaggatgttttccttttccctgtttcctgcttttcaacaatgcacaaaacctctttgagcctcagactggactgcccaagacccacctcctacagcacctaaatcttcagctcttattctccagcaataagaaatcagttccatacacgttaagagctttggtcccgggcctcagaccagatcattggtcccatcaacctcagaccatatgttcacgtgaggacagcaggtgggaggccacctgccttcccccatctgcttgccctgcctgggatactgaaacacaggtaaaaagtggagaggcatcttcctgtcccagcccagctgctgagaggtgaactagagagggcggcctcgatccagtcggcccagattgaggcccagactcagacacctccgggttcccacgctcaggcagcaggcctgaagcagaactggtttcataatctcacctctgcccagtgctttttgcaaaatgatctgccatttggttcccacatcacaatcatactatttatctatgcaaaacagcacctcattaaaaaaggatgaaacacatcaccattggcccaacccctcattaaggtataacgcacaggccctaggcacacccagggtggaaccagcacccagactggccagggtgttaggcccatgtcactagctctgtccccaccctcaccccattcctcctaagtgagctgtgctgctcctcaaatctgtgtggtgagagatgacagagaaggagtcctttggaactgagagatgggttcacggggggagcccctcctccaagaggccttctcccctgaactattatctctacttaaacctcttcctcttgccttcagcccagcttctacaatgatatttgctgactactgacatatttttacctttgtttctcactagaacggaagggccctgagcagatgaaccgtattatgtttttcagggcctaaaccagtgtttggcacaccgtaggtgttcaggaaatacttgcaaaatgctcaatttaatttttgacttcatgataaggaattccatgattgtttttctgccagatggttcccctcccattctcactggagatacaccacccctttggttgtgttaagcaatgctttctacccttgacacccagggtctcaggaataaaagttgaaatgcttgcattttgaagaataatctcatgctttttgtattatctcaatgactttaatttactgtgcaacatttaggacatacagaaaagaaataagaaaaatatcacagccatgtactcaccacccaacttgaaaacacccaaagcatgatcactacaacagaagatcccaggcaattctgatgccaggcacctatccccctttctctccttcagaggaacctatatctcaaacgtgatgaccatctgaattttttacagttaattttttaatgtaatagatatgaggtttgccatcggtgtgtccttcaggctgaagtcagactgtgttctcaacccggcccggcccgcacaccgcacctgctctgtgccccagtttctctatctgtaaagtggtgataataatacccgtctcttccccacttctctgagtgtgcagatgagtgagataaatgtaaagtgcttggagcgtcaggagagagaggctttagacaaccccaagcaggtaagtagtgcaggaagcgccagcaggcctccaccatgggtttctcatggccgagaagggtgtgctgatctgctcacctgcctgcgccccgaccccggacaccagctcattcacaccagccagccagctccaccttccctctatgggtagcccttctttggtgcttctgggatcctggagctgagacagccagcagccccctctgaccgtagaggacccatttcagccacagaattggcaacctctcactgtgctgccttacggtccttcctctctcctttcctgtcattctgtgtgccagagttgtgctgtctacacagcaagctcctaagcaatggtggtgatcaggctatgtatactcccgaagaaatggggaagaaagggtcagcagccatgtctgaggctggtgtgaacgtgctgagtaaacaggccagcgagatctacaaagtttaagactccctgctcccaggaccaaaagagacaaacaaggttgaaaagcacaaactcaacatttttaaaaaccataaaatgagacaattcccacctaaggccatctctcatatattcacaccagagggcttcaagtgtgggaattgtgtcgggagaagcagagcaaaagctggctagccggtccacaaggctcgagatgggggatacgaaggtaggatggtcaatggacagaggccagaggcagaggctcatccaagacatcacttgactaaaccagtagagacctctgaagcagtacaacagtgtggtcaaagaaaatggcaagcttggtaggtaaaagagtttgctgacacagatgttatctacagtggagaagtcactgtcattagaaaatattcccccatttgctaaatgctttcagcactccagccggagaggcgattcagaacgctgatgttgcagataagtgcaaggatgggaggagctgcggctcccgtccttcaatctcaagaatcctgccaattccaagcacccacgctgtgtctacggttcaggacagccctggaggaagatggtgctcccagaaaaatcccaaagaggtggtccagaaagctggccaccaacaaggggcactgacaggagaactggaggcttggatctctgacctaggatgtcaggagctgccacagataagaactgagagagtcagggctggaaagcagggccattactgggaaacttccagtggaagagaaagaatcttgagagatggctgagggaattgagttctagacctagatctgtgtgaccttgagtcagtcatttcatctctctgggcctcagtttcctcatttgtaacatcgggggttgggttggattacgtctaaggttctatcacattaacatcctatggacagcatcagagaacagggaggggaccaacactggaatgtccctaaatgtaatgcattgggccaccaaagcagaacggagtgtagagttaaaactcatatttggagcccggtgcagtggctcacacctgtaatccctgtcccttgggaggtcaaggcaggaggatcacttgaggccaggagttcaagaccagcctgggcaacatagtgagaccctacctctagaaaaataaaaaaattatccgggtgtggtggtgcacacctgtaatcctagctacccagggagctgaggagggaggatcacttgagcccaggagtttgagtctgcagtgagctatgatttcatcactgcactttcagccgggcaacagagcaagaccttacctcaaaaatatattttaaaaataataataacttataaaggaacttgtatttgtcaagcatcagaacaagctgtaaagctttcctaaccctgcttcccacagccacacacagcatcctgacctccttgtcccatgatcagagtatgagccagtgggctccaagttggtcaacccaattctcagtccactacttgtgctagctgtgtgacttcaggcaaggcagttatctttttgccttgcctgtttcctcatctctaagaatcttcgcctcctccctgccccacgaggagggtgagagaattcactgagtaatgtccacttagcacttagcttgcaaggggggaagagtcccacataaatagaagatgacgagggttgttgtgacagctgtttgattccctgagctcttccccagcccttcctttgctgctgatggaaactaacctgttgtgagtcactattgtcttgttctcaaagttcagttcagagaattccccttgagcctgaggttcctatctagcctcactgccaaatgaggagacatcagagaacaaggctaagaaaatatgatgccaccacttccctaacacttgattccactttgctttttagccactatactgtacgcttcctaagggcggggacatctgggcaaccatgttgcacaactgcagggggcaccctctgccagcatttagttgacacccaataagcatttgttgaatgaatgacataaactgcctagctaatatttgggtgggaggaagaaaactaatatttttgaatatccaccatatgccaaaagcattttctattttattcattcctcttagcagtcttatggaatcaaaactattctcccaatttatggttgggtaaactgagactcaagaattaagtgatcaccaaggtctcatgcaatgtaagcggtagacaaagactttgaactcatgcctgtttcactggattccagtcacagtcccatgaatgtgggtaggggaaggaggcaaataccttaaaccaagataagctgagacactgttttcaacaagggtttttgctggaccaacagggtaatagtgccggaagggtatggcctgttagtaacagaaaggccccctcaaaccaggcctttaaatggtaagtgctggctgagaaaaagcccaagtttcaataggttctcaaacccttcaggagagccaagagaatctgggctgtcccttctcccttcctttatgcctattcttacctccactacctcaccatcgtcacacacatgcacacacaatccctgctacaaggtctcccaacaaatataaaaacagagacacacaatgtctattcccctctccctgcaaaacccctctgttcctagaagactggtgagagctgacaagcaggaacgcggacaacacgaatcacagaaagaacaagaaaagaccgggcacagtggctcatgcctgtaatcccaacactttgggaggccaaggtgagtggatcacttgaggtgaggagttcaagaccagcctggccaacatggtgaaaccttgtctttactaaaaatacaaaaattagccaggcatggtggtgcatgcctgtaatcctagctactcgggaggctgaggcgggagaatctcttgaacccgggaggcagaggttgcagtgagctgagatcacgccactgcactccagccttgcgacagagtgagcctccatctaaaaaaaaaaacaaaaaccaaaaaccaaaaacaaaaacaaacaacccccccaaaaaaaaacccacaaaaacaaagaacaagaggacttctttgcctcaacactgctaaaattcaagagtataggaagtagcccttgtcctccagtctctgcctgggacattttcctagcatgaacagtatgggcaaggctcccccagcaccacagatgaacccaggttcaactcctccattcctgagctttgttgaccttcatgagttctttgatatgggaacaatcatctctggtctaatatcagaaggaactgtgctttcaaacaccacaatgggccttgtttaaggagcagtccctaggagagcccgcagggagcagtacatatttactcaggcctatggcacttgtaaaggaattattggcagttgagaggcgcttccagctgaatgtatatcccaaggcatgctagctcccctcacctggggcctgataaatgccgggtactctgtcaattggctgacatctcatggcttccccagctgctgcccagagtaaagcaatgggattgagcgagttcatggtatccctcttattctttccatagatccaccttgctcagctcttttttgtttttattttttaataaaatagagacagggaccttgctatttttcccaggctggtcttgaactcctggcctcaagagatcctcctgccttgatctcccaaagtgctggaattaaaggtgtcaccccccgcatgcccggcccttactcggctctttcaacccccaaagatgagagtgtctaacaggaaagtgaccacagcttcacttgctagaagataacatcactaaacagggaacccaggactgaaggctgattgttgcacctgtgagcctaaatcccagctctgccaatacctgctgtatttgtgtactagggctaccgtaacaaaatcccacagatggggtggcttaaacaatgtatctgtttcagaaacttattatctacctcagaaacatattttctcacagttctggaggcctgaggtccaagacccgtgtattatgaatgtcaaggacagagtagcaagtagtaaagaagaaccacaggccattcttggaaagctagctgcattgacaggagatgcttgggcagtgcacagctggagaccttcctgtctttgcagttctctctgcttacttccaaacaagttgtatatatagattttgatttagacactttcaggtgcacacaggcctctgtcagtaaaataaagaaaacagggccgggcctggtgggtcacgcctgtaatcccagcactttgggaggccgaggcgggtggatcacctgaggccaggagaccagcctgaccaatatggtgaaaccctgtctctactaaaaatacaaaaattagctgggcgtgatggtgggcacccgtagtctcagctacccgggaggctgagacaggagaattacttgaacctgggaggtagaggttgcagtgagccgagattgcgtcactgcactccagcctgggccacagagcgagactccgtctcaaaaaaaaaaaaagaaaagaaaaaaaccagattcctgtctccataaaatatctgatgctgctatttttttattcatttttttctgggcctcaggggtaaagaattgagttaatcatcctatttgattcatggcagcatcacactcactgcattcccctcgctccagtagttgctatactcatgtgtttcaagggatcctttgataatgatatattcttgtgagatacatggtattattctgtaggaggattgtatttttaattcataaatggtatgctgtaaatagcatttggtttcctgctcttttttccagttctaaggtatcaccatgtgacagtatgtgcatatcattccctgcttctaagatccatgggtattccatagtgtgtgcctaccagttaacctatccacacacgtggtgatgcacaactcagctgccacatacaaggcagctgcaagtgccctggtggctggcacaagaactgctctgagaaacccaaaagggtttctgtgccccaggtggacacatcctcactgcactgaacccttccagactgctttgtgaccaagcagatctatgtaataaggtgcttggtatagtgctttttaccttatcagctattaaccaaagaatcctacactggggcatcagggtttaatccagttctgccacggggtggctgtgggatgttacataagtcacatcatgtgtctgggtctcaggatcctcttccaccaagtgagtatgccggacaaggtcaacccaaggccaaccctaaccccactgggagtgcatctgaggggcagcacaagacaatgaagcagagacaccttcagaccccaagtcctggctttggcggcctttgagaattgcggaaggagcccactgggaatatatgtgttataggagtcctttgacaattaaatgaaataatggacataaagtacctggcactttgagaagctgttcaaactgatatctactctctttattcccaacccatgccctttccctgttttgtcattttccattgaagaattctgaaatttttcggattctaaattctgacaatttaccgttcattctctgtcttcttaatgaggtgtaaatacatacagtaaggtctaataatcttcttttaataacagctttattgaagtattcacataccataaaattcaccctttaaaagtatacaattcacaggtttttataatactatattcacagagaaatctcatcactacttaatttaagaacattttcctcgccccccaccaaaaaaaaaaaaaaaaaaaaaccctcactctccatttcaccctctccagcccctggcaaccattaatctactttctgtcactattctgagcatctcatacaaatggaatcatttaccatatggccttttgtgactggcttctttcacttagcgtaacatgttcaaggttcattgtcaaataatattccactctatggacacagcacattttgtgtattcatttgtcagttgatgaacacttgggttgctaccactttttggctattatgaataaagcttctatgaacattcatgtacagattttcgtgtggtcatgttttcaattttcttgggtatatacctaggaatggaattgccaactatatggcatcttaatgcttaacttttaaggaggtaccaaaatgttttctgaaacactgcttttcagtcccacagccatatacgagggctccaatttctctacattctcatcagctcttattattgtcttgtctcttttgttttagccacgctagtgggtgtgaaatgatatcactttgtggttttgaagtgcactaatcttacattagcagcttggtttttgcaaatgtgtgcacctaagatacatatacacagatttaaatatagaacatttccctcctcctgcctctgagtcactaacttcctacccaaggtaaccactgttctgcagcaacattgcctgattttcgtgctctttaactttatgtaaataacaacataaaatatatactcttatgtctagctttttttcactcaaaaaatgttgtggtatcagtggtttcaggtgcttgttctttttacttctatgtagtatttcattatatgagtatactgcaatctgtttattcattcttttatgagtggacatttgtgttggttccaacttggggttattatgaataaaattgcaaaacactcttgtacctttcttttggaagaaatatgaactcatttctcttaggtctgtacgtaggaatggaattgctggatcacagagtagctttaactttagcagaggttaccaaacagttttccagagtggttgtaccaatttacatgcccatcagtagtgtatgagcatttcaagttgttctatatcttctttggcacttgaataaatcagtctttttgtttttgttttttaattgagacacgatctcattctgtcatccaggctggagtgctgtggcacgaacatggctcactatagcctcaacctccctgggctcaagtgaccctaccatctcagtctccagagtagctgggattacaggcgtgcaccacaatgcctggctaattttttaattttttagaaatggggtctcactatcttgcccaggttagtgtcaaactcctatcctcaaacgatcctcccacctcagcctcccaaaatgctgggattacagatatgagctaccatgctcagcctaagtttttaacgtttttcaagtaagttttagttttggtgtataatggtatcgcactacggttttaatttgtgtttctctagcaacgaatcatgttgagcacctttgttcattgccttcagtctgaaacttagctgaaaggatctgacaaataatgctcaactctccctggtggttaccagaagagctaaggattgaggtgctccagggggccccatcaagggtgaggtcttttatcccagatccttgatcacactctactaattgaacactaataaaaatccattgctaggagcatatttattcatttttgaattaacagtattttactttcaactcctagaactctccttgcaacatatccttaacccaataaagaaagagatggagaattagcaaagtaagtgtaaaaaaaaaatttaccagtcaatcttcaaggcaaagaattgactatactaaacataataacttttcatttaaaagttaaagtcaggtgaagttatagtctagtgtataagggatgtttaaattcatgtttctctttttgtttgtttgttttttgagacagagtctctctctgtaaccaaggctggaatgcagatctcagctcactgcaacctccacctcccaggttcaagagaatctcctgcctcagcctcctgagtagctaggactacaggtgcatgccactaagcctggctaatttttgtatttgttgtagagacaaggtttcaccatgttggccaggctggtctcgaacttctggcctcaagtaatccgcctgccttggcatcccaaagtgctgggagtacaggagtgagccaccacacacactttctctttgttttttttttaatagaaagtttatattctttatgatagcttaatggaaggagcattcgaaagagggtcagttaccttcaaagaaagtgtactctgtcctcaagttgggagagatcatgtgtgaggtaagtgtttcagaaggttccttagggtaatcacattatacagggctctgtgcggtggacacagaattgtaggggattgggaggatgctatgagaactaccaaggtgattggtgaaatgtcggtcaggctccagacacctctgctgcacccactaggcaggactggggtaaaatgcccaggtcctttgggcagaggaatttcagaaacaatgtgaggaaagatttggagttcccaacacctccatgccagtccccatgtaagcaagcaggactttcccacccaacaataaacgcctctctcccctgcccaataaatatcactgatgtgtttgtgtcttgttacgccactggggcagagtagtaagccccctgttaaagtcaacaaaagcaaaaatcatcccacagcttttatcaaatactaaaacaattttcactgtggaaaatttcttcttaatagggaaatggaaaattacagatatagaatcatccaatcttagagctggaaggaaccttggaggtcatcagctgaacctcaagcccactgctggaattcttattacaacatccctgctgtcctctgcttgaacggtcctaagcccgggccctttctcagcacctctaaggaagttttccacccattgttgggtggttgttagacagtcattcttatgttgaaccaaaatagtccttctggaaacttcacccttcaggcagagtttgaataagtctatttcctctcctctgtgagagctctttgagtattttaaggctgtaagcctcatcccctctgagtcttttgtccccagaccaagcattcccactgcctccaaatatataatgatccattctaaaacctggcgaaggacaggcatcaagtcactggtgtgtggtcttcctaatccttctttccctcgtcttgaaaaccagatccacagcagagattggagcagcctacccgctctcagggattgccccaaggtacagatgatgcttctgtgaaacctttgcaagttcagcggttgagggatgcaagccgtaaactaacggatgagaggtttgttttttttttaagtttttaacaagcttgggtatttttaggaaataaaagtgacactgttgaccccaatctggaatgagcccaagcagttttcccaggagatgggtgggttcttgctaatcctgttgcaaactcttaagtattttctaggcacccataagtatagtacagtattatgttcagaaaactgctagagcttccttagtcctggttttatccacctgggcaaagtggcccaaccagggcagtgaggatgagtgcatggatactcatacatgtacaattcatgttcaagccttacctgctatgctggtgaactagctgcttcaccgtcccactccccacagcccagaacgcagtgggtagtagtctacttgtgagcaggtgcacacacatgtatagacacacatacaaccttcccaagcacacgcacatccttgagggccttcctatcaatacccccacttgtattcagctatctatcaggggcaaaaaaaataaaccaggtctctccctggaggcgcaatgattttatggtagaggtgcttttgagcggccagcaaaacaagacaaaggtcttatttggtttatcaagcctaggttaacccattgttcagtgggccaggcagtgttaatcagtacccaagcctttgaataaaatctttgccaaatagatctgtgcagatattcttgctacataatgataaaagcaatacttctggtagggaggcaaaaccactaagattttaggcaataatttttccttgcttacaaaacagggagtaatgcctaccccaaagatgtaaacagtttttaattctttgaaggagaatctgtcacttatgctaaaaccaattgccaaaataatgctaaatggagctttctggaaagaaggtattgtaagtaaaagtcccagaagaaacccttctctccaatttcttcttacgttcctgtgcaaacccacgaaggagggaattgcatgattttaagaccaaagtcctctgtttttaaaaatcatatatcaaaacttgagaatgcaaaagagttctaattacaacacccaggggaatggttatgaaataccaataatggttgataaatgctcaacctattcaatgaaacacatacacaaacctttgaccagaagcacggacttagaaggtcaccatcagcatgatgaaagccttggaacacgcctctgacaagcaagaagggcattagagacccaggtgtttcccctttgattaatgcactctctgagaagcccagattgagagggagctatacatgatcaacctttgttttggaaacggctttccttgatcttcttgggttattgtgcagcccattctacaagcctcctcccatcctccctcctggttgtcaaaacaagtctgtgggagaggcattctcaggaatgtatgatgctctgtttaatatggaaaaatgatccttccaaggcaggggaagaaataaagaagcagatttcctcctcagccttcacaatacaaaccctcaaggacactgagagaagggtggtttaacaggtgcatgaggaagatttgaaagttgtggctccttcagaaatttgcttcccagtttaattgtaggcatctaaagggttaggtcaactctaaggatgattcaagtattccctctcattttcttttcttttttttttttttgacggaatttcactcttgttgcccaggctggtgtgcaatggcatgatctcgggtcactgcaacctccgcctcctgggttcaagtgattctcctgcctcagcctcccaagtagctgggattacaggcatgggccaccacgcctggctaattttgtatttttagtagagacagggtttctccatcttggtcaggctggccttgaactcccaacctcaagagatccgcccacctcagcctcccaaagtgctgggattacaggcttgagccaccaggcccggcctaattttctccttttaagtttcttagaaagaaaggtgagaggccgggcgcggtggctcatgcctgtaattccagcactttgggaggctgaggcaggtagatagcttgaggccaagagttcaagaccaagctggacaacatggtgaaacgctgtctctaaaaaaaacaaagcaaaacaaaatacaaaaaatagccaggcacaggtggcatgtacctgtggtcccagctactcaggaggttgaggtgagaggaacacttgagcccagggggcggagattgcagtgggccgtgatggtgccactgcactccagcctgggcacagagcttgtgaccatgaccctgtctcaaaacaaacacacacaaaaaagtgagaactgtttaccccctgcttagagaaggaaggttactactctcaatggggatggttgaatttttcaaagattagcatatgataaaacaagttgtacctagttaggattttctgaatctcagcctgtaaacttactatgtgatcttaatattgctgaatctccatttcctcatctataaaatggggctgaaatcttcctcagaactgttgcaaggatcaaattaggtaaatgaagttcaaatttaattctgatacctggcccacggcatccaggaaacagtagctattattatgtaattgactgttctttgcttattcattcatagactacagggattttgtgcacaagaatcaatattatgaaaataattattatgtagataggcaatgctagatatccaagcataaacaacttagtaataaagtgctgaaatccatgtgactcttgaacagataacactttcatgaaatccgactggtagatgtctgctgtgatataatgggaagggcctgggtttcaagtctgacatatctgacttccggttccagcaatgctaccatatagcacagaaccggggaatcatgggaaagttactcagaaaatagcctataaaatttataaagcatttacatgcttttattattttacaatgcaatattttctttttgtagtcagttttaattgtgaggccttgtatttttttaaatgaaaatttaagcactctttcaaattctttatctttagagaactatattatataaagtttggaaaacaggaaagagagaataaaagtcataattccgccctcctaacacaaccaccatcttcattgtgtattctcttgcactgaaagcatccagaagaccacactgtgatccttcttacctgctgtattagtccactttcatgcagctgataaagacacacccgaaactcggaacaaaaagaagcttaattggacctacacttccacatagctggggtggcctcagaatcatggtgggagatgaaaggcacttcttatacggcagtggcaagagaaaaatgaggaagatgcaaaggtggaaacctctgataaaaccatcagatcccatgagacttattcactaccatgaggacagtatgggggaaaccgctcccatgattcaaattatctcccactgggtcccttcccacaacatgtgagaattatatcaagatgagatttgggtggggacacagagccaaaccatattacctgccttccctccaccatcctctcaattgttttactggatttttatctggctaacaaaaacaaacaggcaaaaaacaaaaaccacaacacatacacacacacacacacacacacacacacacatacacacacacacatacatcacatcacatgaaacagaaaaaggcaagatttagactccatatagcaaatggatttatgctacggcgtggcttttatccattgtgaatgtgcttcctaaacacttggttcttgactaatgtgagcgttatcaggacaggacctggaaaaccctcagtgagttttcccccacccatattgaatccccttgggccatcacatctggattggtggtctgttggatgctattcagtcatgagttcctaacaagagacctgaaaaaaggcaaccataaagaagggatggagggatgagttggccaagaaaaaattgtctgatgtgtccagcatatttctctttgggaagcccaaggctgagcatggacctccatagcattaaggagaaaacaacccagcagaaatacatcgttttctgaaatatgtgggaaggggacacttaagagaagtgaagacaaagcatgacactgcttcacaaagagaataataaaacttgaagctctttgccccaagaggtacttcatatggacagaaaataaaaacaaattcaaagagctttgggtgttgagggttggggaggtaggagtgccagataaaatataggacatctggttaacttttcatttcagatgaataataagtaatttcttttttttagtttaagtatgtcctatctattctttgtataccatatcctgtattttttaaatgtgtgaggtttaaggtatctatttttaaaaatatctttattgagatacaactcacaaatttaaaaacgtactcatttaaagtgtgattgtgccactgcacttcagcctgagttgatctattcccttcaaaagcctgtccccagcattcctttgtcatcttcattttccttacaatggaaactccatagctctctgggtgtggtagctcacacttgtagtcccagctacttgggaggctgaagtgggaggatcacttgagctcaggaatttgaggccagcctgggcaatatagtgagaccccatctctaaaaaaaaaaaaaaattcttagtttcccttttctcctctctctgccctcttccccttccccctacactttgacctgcatgacttactgatgaatgatgaatggagagggatggaaattttgtttatcagctctcccaacactgcatgctcttccagggcaaatgaccgtgctcacttgtctttaagtgctttttacctccctgtacatattctggcaacttctgtcactttgggggtgaggatttccccatggaagttctgtgtgagaaatcatgtttaatgtgtgattctgtacagatgggtgtgtaggaaatatgaccggcatacgcactgacgttgacccatacaagtctaggcatctgttaagtgtttggccctgtccaggaagtagccgggccataaaatctgatatggggaggaagcttgaccatgggaggggccccttcacaatagattctgcagggacagtggggggagacaggaatgctagctaggctgagtgtctgagcaaatgtggacagccaaagggagccttggccaaaactcttctctcctctgtctccaggaattggaagtgtcccactgaggtgtcaccgtgagtccatccaaaccttactgaattactacctccattttaaggtgtaaggtgttcagagaatgtttgtgactcaatagttcttaacattttagttcttcaattttaagtgtgccagcttatgaaataaaacacatctgttagcacattgattttggaaaatttccactgatagttgtgagggcagacacagacggtgagattataagattctttttattcacagggacttcttaaaaatctagcttgttttccgttctccttgatgccttgttcatgacaggtgcttggcaaatattagttgaatggctgaataaatatatgtatgagtgaaaggcagacatcaaagtcttcctggatgaggtcaagagcagcctgggtagtgtagcaagaccctgtctataccaaaaactttaaaaggcatatctgtggtcctagctagcctgtggaggctgaggctggagattgctgaagcctgggaggttgagaggctacagtgagctgtgattgcgccaacggacggcagcctgggcaacagagtgagaccctatctcaacaaacaaacaaacaaacaaacaaatcaaaaaaatgttcccagatatttgagaatggaatttgagatcaggaaacaggccatcgtgtgaaaagccccagagcagtcatagctttgccacatagagtcttgtgattggaacatgtcacttaaactccatgaccttcagcttctgtggctgtaaatgggaatcacctcctgccataagtggttttgagaatcaagtgaaatttcagatctgaaaatgcttttctgactataggctgctgtatagatcgaggataatctgatagcgttcaaaacccagtgctcaccacctccaacctcgtgatcttgctcgagttagttaatctacacaagcctcggttttttcatctacagaatgagaataataatcacaccaacctcactgaattgtcttgaaacttacatgaatttatatgcactcgagagcacagaggtgagctcacgtgactttctcttccctgggttgccatcctctgcgtattttcttttttttttttttgagacagagtctcagtctgtcgcccatgctgcagtgcagtggcacaatctcagctcactgcaacctccgcctcccaggttcaagtgattctcctgccttcgcctcctgagtagctgggattacaggcgtgcaccaccacacccggctaatttttctttttttttttttttttgtatttttagtagagacagcgtttcactatgttggtcacgctgatctcgaactcctgaccttgtgatccgcctgccttagcctcccaaagtgctgggattacaggcgtgagccactgcacccagcctctctgcatattttctaagtagcttgttattctgcattgcccagacttgtttctctgccaacccaccagtcagtaagtaaattaattaggtgataagtgattccttgatctttttattattactatttggttatgatgattaaagcagatggtcatctgattgggcataggtcatgcatgcaaagcagctgcagtggtatctcaggattgtttccttatcagagacctgccatccaggtgtttcctcatcttaggagccgccctctaggtttcctcaaattgtgtctttcagatgagacccacccatcggagccaggctttgaaggaactgaccgcagtgtgcatgaggaagtacttcacggtgatgaccctcgccaccctctcaggaaaacacagtgacctctcccccaacatccccttcccactcccaggtcccccggcaaaggcagaagaaccaagcaagcctttccaccaaagcagccatgaaccccattctcatcctttccaagaactctctgctataccagataggggtttggggttctgttttccattttttaaaaaaatcatttcaagactcttgaacagtgtgtcggtttacactattctatcttcttaagccaccatatcaacatattcactctgcttcctttcttttcatttggcagatgccacacttttaatggcagcaataaaaggtgtttctatcaatgccaggtgggcagccctgaccatctaaagcctcggagagggttataccaagtctcctgtacacctccgtgctagtgacaacatgtggggacctctcatcccaaagttttgggacaaagtctcccgtcccttatcatttgttttcactgaggctaaatgtatctgttcagtacatggatagatttttaagctcctctcacaaagtcttgtgcttgagacaaaatcagcccaggttctgcactttgtctatatttcagcagctctcctgcttgatattaaaaatagccttgtctagtccatcgagatcagacccaggagacaggcgcctgctattctaatctctgcttcacaaatagctctctatgggctcaagcatctatcaacacttccaggggtctccagttataaaacagggccaggcctagtcacctataaaggtaggctctgcttaactcccctgagctgtccatgaggttagcatgaggcctacaacaatcacatttctaccatggaccagagacttccaatggtgactcaaaactgagaagcagttaagagcatcccccacactcagggtatcctgcatttcccaggccagaacctacaaaaggttcccttgagactcaaactcaagcagcactggtaaacaggctgcccctccccgcttcttccctcctcctgcaaaccaccccccatccctcactttcacctcccttcctccccaagcccatcttgtactctgtgaaaaactgtagtcccctcagttgccaagggaaccaagccttttattccatccgtgactagctggttgggctgaggagtggggcaacaactggtacccaggcctttggaagcccaagccctccctttttcccaaagggggaggggtgggctgcaccccccgttgccttttcacccaaacccagctgggtgggaccgagcccttgggctctcaggagctccctggctgtgggctggggagatcagtgctccccaggccctcctctggccctggccctttccagaggacaatagccttcatgcaagggaaaattccatcgcccagggttcaagtctccaaggagttgctggggcctctatttagcctggagtgggctctgaggagccgctgcagctgcccggcttgttttccccctcgctgtgttttatttttaacccctgagctgccaaggattgtttttccccaaccagtgcctgggaactaagggagggaagaaataaggctttgttccctttggggaactaattgggaaagacaggcagtgtggccagcttggctctattagggtgtggggctcccacccctcactgcacaacatcttcaccccaatccatacccaggaggctgggagtgcagaagtgccccccaggatgcaaccagaggcccgggggctggtgggaacgcaagtgcagcttcaagactgcaaaggcagctcagagccactttcttgggctccgaagatattcagga

SEQ ID NO: 497 - DNA, 92050 bp, Homo sapiens
  source 1..92050: mol_type = genomic DNA
ccacagggcctcggagggcatgaccccagcccagggaggagcaaccttcaggtggcctccaggaggcagctgggaaaagggcaaagctcaccagctctcaactttttttttaaataaactgaaattttagaatagtttttcagatttacagaaaagatgataaaccttagaaacattatatgctaagtgaaagtgagaagtgacagcctgctggcagtcctcacagccctcgctcgctcttggcgcctcctctgcctgggctcccactttggcagcacttgaggagcccttcagcccgccactgcactgtgggagcccctttcagggctggccaaggccggagccggctccctcagcttgcggggaggtgtggagggagaggcgcggtgggaaccagggctgcacgcggtgcttgcgggccagcgcgagttccgggtgggcgtgggctctgtgggccccgcactcggagccgccggctagccccgccagcctgggcagtgaggggcttagcacctggaccagcagctgctgtgctcgatttctcactgggccttagctgccttcctgcggggcagggctggggacctgcagcccgccatgcctgagcctcccccctcccctccgtgggttcctgcgcagtccgagcctccccaacgagtgttgccacctgctcagggcacccagtcccatcgaccacccaagggctgaggagtgcctttggagcagggcacgggactggcaggcagctctacctgcagcccctgtgcaggatccactgggtgaaagccagctgggctcctgagtctggtggggacttggagaacctttatgtctagctaagggattgtaaataaaccaattggcactctgtatctagctcaaggtttgtaaacacaccaatcagcaccttgtgtctagctcagggtttgtgaatgcaccaatagacactctgtatctagctactctggtggggacttggaaaacctttttgtcaacactctgtatctagttaatctggtggggacatggagaacctttgtgtctagctcagggattgtaaacgcaccaatcagcaccctgtcaaaacagaccactcggctctaccagtcagcaggatgtgggtggggccagatgagaataaaagcaggctgcccgagccagcagtgacaacccactcgggtccccttccacaccgggatgctttgtttgttcgctctttgcaataaatcttgctgctgctcactctttgggtccacactgcctttatgagctataacactcatcgcaaagatctgcagcttcactcctaaagccagcaagaccacgaacccactgggaggaacgaacaactccagacgcgccgccttaagagctgtaacactcaccgcgaaggtctgcagcttcactcctgagccagcgagaccacgaacccaccaaaaggaagaaactccgaacacatccgaacatcataaagaacaaactgcggacacgcagcctttaagaactgtaacactcaccgcgagggtccgcgacttcattcttgaggtcagtgagaccaagaacccaccaattccggacacaaaagaatccagacccaaggccacatactgcatgactcaggtcagaggcgtgggagccacagcaaccgcgtcttaaataggggctgggtaaaaacgaggctgagacctgcggggctgcattcccaggaggacaggcattcttagtcacgggatgagacaggaggtcagcacaaggtacaggttcaagatgcgggtcccaaagacactcctgataaaataggatgctgtagagaagctggccaaaaccaagacagcaacgacagtgatctctagtcatccttgctgctcgttagttgctaattataattcattagcattctaaaagacactcccaccagcgcagtgacagtttccaaatgccacggtaacgtcaggaagttacctatgtagtctaaaaaggggaaggaccctcagttccaggaaatcttcatccctttcctagaaaactcatgaataatccgccccttgtttagcatgtaatcaagaaataactctaaatatactcactagcgctcatgctgctgctctgcctttggagtggccatttttttttttttttttgagacagagtcttgccctgttgcccaggctggagtgcaatgatgcaatctcggctcactgcaacctccacctcctggtttcaagcaattctccggcctcagcctcctgagtagctgggattacaggtgtgtgccaccacccccagctaattttattatttatttattttttttttttttgagacagagtcttgctctgttacccaggctggatggaatacaatggcacaatctcagctcactgcaacctccgcctcccaggttcaagtgattctcctgactcagcctcctgagtagctgggattacaggcgcttgctaccattcccagctaatttttctatttttagtagagacggggtttcaccatgttggccaggatggtctcaaactcctgacctcaggtggtcaggccttggcctcccacagtgctgggattacaggcgtgagccaacgcgtctgtcccacccagttaatttttgtatttttagtagagatggggtttcaccatgttggtcaggctggtctcgaactcctgagctcaggtgatccacccacctcagtctcccaatatgcttgaattataggcatgagccgctgcgcctgtttcttttctttcttttttttttttttgaggcagagtcttgctctattgcccaggctggagtgcaatggcgcgatctcggctcactgcaagctccgcctcccaggttcacaccattctgcctcagcctcccaagtagctgggactacaggtgcccaccaccacgcccggctaattttttgcatttttagtagagacggggtttcaccgtgttagccaggatggtctcgatctcctgacctcgtgatctgcccgcctcggcctcccaaagtgctgggattacaggcgtgagccaccgtgcccggcctgtttctttactttcttaataaacttgctttcactttatggacttgccctgaattttcccttgctcgaggttcaagaaccttctcttggggtctggatcaggacccctttctgataacacttacatgaaatatccacaagaggtgtagacagaggcagaaagtgggtttgtggttgccagggcctaggggcagaagggaatggggagagcctgcttagtggccgtgttttccccgttggaggtgaccaaactagacagtggtgatggttgcataacactgtgaacgtgctgcttgccattgaattatacactttaaatagctaactctatgtgaattccactttaacttaaaaagtggtgacaactgaatatgtacaaagcgtaactgctatattaatagtaacaagtcaacgtcggttttcaggttttgcagtgggagaagctggtggaggtacacgggactctgctatttttgcagcttcctttggatctataattatgtcaaaataaaatgcttttaaaacacaaaaacaggccgggcacggtggctcacgcctgtcatcccagcactctgggaggccgaggcaggcagatcacctgaggtcaggagttttgagaccagcctggccaacatggtgaaacctggtctctactaaaaatacaaaaatcagctgcgtgtgctgacaggtgcctgtaatcccagtcaggagactgaggcaggagaatcacttgaacctgggaggcggaggttgcagtgagccgtattgcaccattgcacttcagcctgagtgaccagagtgaaactccatcaacaaaacaaccaaaaaacaaaacacccataagaagtgttacctttcacagtgttgtagattgtctggggcctggctgggaagtcgttctgctccacgtggtgtccccgggatcactggtgggactgcattcgcctggaagctcagcaagaccagaacagccagtggcagccctcaccagtcccgcacctcagctaggtgcttcagcggccagaggctagctgggcctccccgactccacggggcctcccttccttggggtgatgccaagagcttctttccatggatgctgagttccaggagcatgaaaatagaaaccaaaggcccttcagtctggcttggaaggtcccagaatatcacttatgctgcatcctgttgttcggagcaagtcagaaggccggagaatattgcagggaagaagagataagcccccttctctttgtgggaggaactgttggtggccacctttggaaatgccttgccactgtctttcctctggccacagtccacacccctcccacataaaaaatatactcaacccccttccaccgttaaggcatcaaatcagagtccaggatcctgggatctgcaccaggtccagaaatgcagaccgtccagagctgtgagacattctcggcagtgctaacacacacgttgtgggactcctaggaaaagaaacagaacaaggccaggcatggtaatcccacgcctgtaatcccagcactttgggagggcaaggcgggcagatcacttgatgtcagtttgaaatcagcctggccaacgtggtgaaaccctgtctctactaaaagtactaaattagccaagcgtggtggcaggcgcctgtaatcccagctactcaggagactgaggagaattgcttgaacctgggaggtggaggttgcagtgagctgagattgcaccactgcactccagcctgggtcacagagcgagactccgtctcataaaaaaaaattaaatatttatattttatataataaaatataaaaaatgtttataaaatatacgaatatattacgtatacatgaatatgtaatatattcatatataattatatatttatatatattcatatattttacatatcttaaatatatatacaaacactatatatatatatatattttatccagtattttgggaacctggcagtggtcgccgtttcgagccaggcgcaatgcggagccgcacacagaactgcgggtcggcagagggcgcggggcggacgcgctgcacctcgccgtagcgcacaccagggggcagcgtggagctgcacgaggcccagggcctgggacagacccaggacaccgatctggggaccccgcacagacctctgtcccagtgagaggtgcatctgcaactgatgccgggaccctcttccccagggtttctctgttgctatcaaagatgaccctgggccaccagttccaccacagccaggagggcgcggaagccacccacacccagttggtggagctgctgaggatgcccagcgacccacgctgtcaccccgaggcagcaagtgccctgccctggtcctgcgcatggtcagccagctggtggagagggacgctggcctcctgcccgggttagggccggtggccagggggacgctggtgaggattaagggcctggggccgccagcctggtatcagggccacgctggtggctttagtaggggagaggaactcaggagggagcaggagtcctgggagaggaagcagggcccagggtgggctcggcgcctcagagaccatcaggccggtccactttccaacgcctgggtgtctagacctttctctggggcctgtgctgagcagcgggatcagaagtccagcatcctctgccaggtctggccctgcttcagctgggaggggctgttggagctgcttcctgcagtgccctgtgtctgggtgggacgggggcagggagagtcagttcagatgatcccctgatgacagctgtcactgcattctcccgtgccggtggcaggcagaggccatggggagcccctgcggcccctccgagcagcccacgcctgctgcccgagttgagaccccagcagggcaccctctaagaacgggaaaaatagtttattgaaccgtacttctccattgaagtctttaaacataaaagctctgtaacaaacatcacaatttcacgtcatctgccatataaatagaacctacactgagatgcatgttatcaacaggcatgtccccagggtgaggctccccacccgggacccaacttggtcagttacaaaacagggacgaaggcgggaggaagcccagtgtcaccaggtgggaccgggtgccgggcctgtgggggtgtcctcgcagcccccctagagagggggcgtgcggaaatggatcttcttggctgtttccacgtcggacttcgcgaccaggaaccgcatcttcttcccgccatgacggatcaggtccacagctctgaaatccatgccagaggtgggggtgggcaggagggcaccaggggagacccacagggtgcagccgggcctctcctttaccccaggtccactcccctgagcagggcatctgggagaaggggccgggcgtgcatgcggtgggggtacctcaggtagccaaggcccaggaggctgctgccattcacctccaggatacggtcccccagcgacaggcgcccgtcggccgctgcggggctgcccgggagcagggtctggatgtagagcccgggggcgcccaggtgcgtgtgctggggacaagcagaggcctcagagctccgcaggcccgactggctgtccccagcgaggaccactgcagcccctcccttggcacctacaggcccccgcctggcatccagccaggcccactcatggtttcacgcgtccctccagaaaagcagtggacaccaccgtccccacaggcccaggacagaccccaaaggcttgaggacagaggcaagagacagcaggcccagggggcgtggccgttggacaggctgggttcccctcccagctgcagaggccaaccccactctcctccccgaaggccttcctgtagccacgtggccacgcaagctgcggccaggcttgcatgaacaggcggggccaggcagccagtatgggggtgcggcgagggtcctgggccactcaccatcccgtcgatcaggcccatccccagcccggaggggcctcgttccagctccaccgtgaagacgtagcagaagtcctcggtgctggagctgcggctggacggggctggaggggactcctccgcaagggctgcagagtctcctgggtgggggccaggaaaggtgggtgggagtgaggcgccaggaatcacgacgaggaatgggatgtcctggcctggctgcctctgtagggcgtcagggatgggatggcctcctgtggctcccaggagacgctgttcaggcagaatgtgaccggcaacccagacattagggtcggggtccgcccatgggcgacacccccatgttccctgagggagcacctcagtccccgcccctggcagtcccaggacactcgcccctctgggggcggctgttttccagctccagggacccacgcggttctgtgccacctcctcagcaatctctgctcctcctcctcctccctccacacccagatgtggccatgtgcaccctgagggttcccaccgctgaccagaccggggccccaggccctagcccagcccagcccaagcacctgccctgagggccaccagctggtgccctctccataatggtgatcctgccgtgggtgcacttaggtcagagatgagctgtgcacctgagcaagtggcctgcctgggacccagcttggccaggtggccccaagccacaggggacactctgactctgcacacgcacccaggacacttcgctcctgcaaggcacacccaagcccctcacaggaggccagggccggctggggctgcctcaccctcaatgccctccccagcctaggccagctgcgcacacacactcatgcacacatatactcacagccatgcacacatgtgcaagcatgcccatgcacacgtgcacttacacccatgcacagatgcacacacaatgcacaccatgcagacacacccatgcagagatgcacacacaatgcacaccatgcagacacacccatgcagatgcacacacccatgcacacacgcaccagcacacccatgcacctgtgagcacacatatccacacgcacaagcacacaggcacacacaggccctgccctggaggactccagctccaccttctccctgaagacccctgggttccccctcagcacatcctctccactggctcagccatcccttcctctgcccagtgcaggagtgactctgagccactttctagactctctccctcccagatcacagtgagtatctgcccaagacgtgtcagcgactgagcgaccgtgtggcccagctgctgggggctgagcagccctgagccctctccatctggccccgtctcaggttgcaggtgtctgtggggcaggtaaggaaacctaggacccaaggggggaacgatcccaggggaccggccatcagggtgctgtgcggggtctggggtgggttcccgcctgagcaccaggcagggctcaccttccggagctgcaccccggaggccgctgagtccgttcctctgcctctctgggagcgcttttccacaggggccgccggactctggccagtcggggtccccaggctcagggccaagtggagtgctgggaggcgtgagcaagcaggacgagtccgtgtgcggggggccagcctgggagcccccacggctgggttgccttccagggggggcctgtgcccagggagcccccctcaagggaagagtacgctccggggccacttcccgggctgctgggccagggtccctgggagccagggggcagctcggggcctccaggtgcccgtcaaggaccacgtggtgcataccctagggagaggaagggtgacagctcaggtagaggagtggccaggtggacacagcactcgggcaactgggcagcctgcagcagaagggccgccaggccgcggggcagaggtcagcaaaggactcccgcagcctgtgcagcttgagacgcgcaagaggcaaaggggcttccccgccatccggagcacagcctgcgctgggccaggactcccggggttcccagagctcccgcctgctgcccccagcccagcttccaacccttctcctgtcctcccgggcacctcggggcacgctggctggggggccccctccccaggtacctcggggcatgctggctgggccccctccccgggtacctcggggcacgctggctggggggccccctccccgggtacctcggggcacgctggctgggccccctccccgggcacctcggggcacgctggctgggccccctccccgggcacctcggggcacgctggctggggggccccctccccaggtacctcggggcatgctggatggaccccctctctgggcacctcagggaatgctggctggaccccctccccgggcacctcggggcactctagctggggggccccctccccgggtacctcggggcatgctggctggaccccctccccgggcacctcggggcactctggctggggggccccctccccgggtacctcggggcacgctggctgggtcccctccccaggcacctcggggcacgctggctgggccccctccccgggcacctcggggcacgctggctggggggccccctccccagacacctcgggtcatgctggctggaccccctccccgggcacctcggggaatgctggctggaccccctccccgggcacctcggggcactctggctggggggccccctccccgggcacctcggggaatgctggctgggtcccctccccgggcacctcggggcacgctggctggggggccccctccccgggtacctcggggcactctggctgggccccctccccgggcacctcagggcacgctggctggggggccccctccccgggtacctcggggcacgctggctgggtcccctccccgggcacctcggggcacgctggctggggggccccctccccgggtacctcggggcactctggctgggtcccctccccgggcacctcggggcacgctggctggggggccccctccccgggtacctcggggcacactggctgggccccctccccgggcacctcagggcacgctggctggggggccccctccccgggcacctcggggcacgctggctgggtggccccctccccgggcacctcagggcacgctggctgggtcccctccccgggcacctcggggcacgctggctgggtggccccctccccgggcacctcggggcacactggctgggccccctccccgggcacctcggggcacgctggctgggtggccccctccccgggcacctcggggcacgctggctgggtcccctccccgggcacctcggggcacgctggctggggggccccctccccgggtacctcggggcacactggctgggaggccccactgccaggcctgccagggctgccggggctggctctgctccgcagaccccacagaaagtggcggacgtagagcaggtgctggtagatgctgtcgtccaggcagttggcttccaagtccacctggaagccgtcgctgggcaggacgatgggtggggggttttcgtaggactccagaacatcctctgcaggggagagaggatgcccgtaatggccacaggagaagctgcctccctcgccaggccgccccgcccaacggtgtgggaacccaggggccagcagattgagccctgagtcccctgccctgtggacacaggaggctgggatcctggccacagtgactggccccaccctaggactcatcccttctgaattcccgccgaccacccggtgtgacatccgagcagttcaggactgagaacaaggccttgtagccaggaaccctccagccccactgagccgctctgcactgggcctgtctctgccccactggtctctgatggtgtctccgggtaactggagctcccccagcccggcagagctggacgcaagctcctcccagggctggagccgactgcctccctgcaggaatcacgggacccaaacggcctgtgtgcgggctgctctctgcccccaggaacaggagcacctttcaggcggcggaagagtgcgtgcatactgagctcctagctcccagcacagaattcaggccacagaaatgaatcaatgcggaggaaggacttagaaggtgtcaggtggagccagggttcctgttcagagatgttctccacggtgacccggggctgcgggggggcatccaaggccccatcgcctctgcgcctcccgccatcccgtactctgttttgttgaggtgttaacacataatgcagatgaagggagatgtgtgtataatctacacattataatgcacccctggccgggggtggcggctcacgcctgtaatcccagcactttgggaggcaggagcaggcagatcgcctgaggtcaggaattcgagagcagcctggccaacatggtgaaaccccgtctctaccaaaaatacaaaaattagccaggcatggtggcacacacctgtaatcccagctacttgggagactgaggcaggagaatcgcttgaacccaggaggtggaggttccagtgagccaagatcgagccactgcactccagcctggtgacagagtgagactctgtctcagtcaatcaatcaataaaaggcaccctcggccaggcacggtggctcatgtctgtaatcccagcactttgggaggctgaggtgggcgaatcacctaggtcaggagttcgagaccagcctggctaagatggtgaaacccgtctctactaaagattcaaaaattagttgggcgtggtggcggacacctgtaatcccagctactagggaggctgaggtaggagaatcgcttgaacctgggaggtggaggttgcagtgagctgagattgcaccactgcactccagcctggatgacagagcaagactcttgtctcaaaaataaaaataaaataaaacgcacccctatgtatgcacgtacacatgtatgcgcacacagacccctccgtatggacatgtgtgtgtgcgtgtgcacatacatggctcagggatgcgtccccacggctgtgtaccaccattgctcccttcctgggtagccatacaacaggggaggccccatcctccggctccgtgagggaacgagggggccttggacctgagcctggagtttggaacttgggcatggactctcggctccttgactcccccgccgaggaggtccccggatccccaggttggggatggggcggggcgggggggtcctctgggtggaggctcctccagggaggtccccaggagagaggtcccccacaccccacttcagttgggatgagagcatgctgcctccagcctcggggcgagtctcccactgagtccccagccctctcctgccctggggcagggcttacctgacctgaaggcctcggggctgtcctgggcccctggctcccaggtgctcatggggcccatggccgaggccagctggtagtgagtcagcagccggtgcagctgtgctgggctcagtgcggggaacgcagcccgcagggctgtccagctcatctgggtgacaagaaggagctcatggtcacaggtctctgggtgcagaccccagcccaaagagggatggcctccacaggtggcctgggggtagccagctgaggggccctgtggtcctcactcccaccaggggccatctgtgagggggacggtgtcacagcagcagttcacccctggcacttccaagggcagctgctccagggagaggccggccagtgccatcgggaaccccctgcccagggaacccacccccgtctcaagcaagggccggcctcacaggcggccgccaaccagagaaaccactactgggaaatgaacagtgaaatcagattcctgcctccaacggtgtgaaagaaatcaatcaagtcggctaaaaacctgcctggaaggcagggacattcatcatttaggtgacaggaggcagggaaaacatttgtttgtttgcttgttttttgagacagagtctcatgctgtcacgcaggttggggtgcagtggctcaatcacagctcaccgcagcctcgacctcccaggatcaagcgatcctcccacctcagcctcctgagtagctgggaccacaggcttgcaccattatgtccagctcattagttttttgtttttgtttttttttgtagagatggagttctcactatgttggtctcaaactcctggtctcaaactccacggctggtctcaaattcctggcctcaagcaatcctcccgcctcagcctcccaaagtgttgggattgcaggtatgagccactggctccggcccaggaaaacgttttaggcaagacaaaaagcctacaccgtaaggaagggtggatccctccaataaaattaaacagcctctgcggcccgccaggacctccatcatcatccttctggggttcctttccccggctcccagccggttcttattttctgcaattcatttcttcagctctctggtttgtcctgtttctatggaatagatcttctagtagcttcccaaaaggggcgcattgcaggaaacccactgccctgcgtgctggaactgtcttcacctccaccctggactggtcatctggctggcacagaactccaggcgggagggcgtcacccttcggattctgcaggtgctgttttgtcctgtgactcccgtgctgctcgtccaaagcaacctgagtgcaaatcttcagggtctgccttgtactgattcttgtctggaagcctgtgggttctctgcacccatcgtcctgcagccctgggatgctgagttttgctgtaagcccactcttggcagcagctcctccacctcaatgcgtggctctggagactgcctgcacctgccttccccgcgccctccacccctctgctggctctttctggactcccactgtttggatgtggcctcgctgctgggtcccctctgttctcacctttgcctcctcgctctgtttctctcccatgtgtttttctgcccatatccaggggcctgggctgtggctaccagatgtccacgctgaaggataatcggtgtctcgggcgtcgtgcaggaggggtgagggcacagaacgacgtcctccaacaccaccggcccccaccaccctcaccccttacacacccttcaagaaagcctctggtttgcccgggggtggttctgtttgattgtgagttcctagaaccttctctactctcacttctgtgcttggtccgggaccagaggtcggggccaagagatcagcttcaagggaacagaactctcctccttcttccctctccttctccccctccctctgtctgtctcctctccctcctccctctccgtctcccctccctcctctctccctctgtctcccctccctcctccctctccttctctctctccctgtctcccctccctcctccctctccttctctctccccccgtctcccctccctcctcccgctccttctctctctctgtctcccctccctcctccctctccttctctccatctctctcccctccctcctccctctccttctccccctccgtctctctgccctccctcctccctttctccccctccgtctctctccccttcctcctccgtctcctctccctccctctctcctccttcctacccctcttcttctctctccctctctctctcccctccctgcctctctctcccccccatctctctcccctccctcttccctcttcttctccctgtccctccctctctccacttcctcctccctctcctctccctccctgtctctctcctctccctcctccctctctccctgtctctctcccctccctcctccctctcctctccctccatctttctccgctccttcctccctctccttctctccctccctccctctgtctctctcccctccctcctccttcttcctctcttccttctcctcctctccttcccctcttcctctctcccccgtccttctctctctcccctctctccctgtatcttcttctgccttcttactctcctccctaccctggcatccctccgccccctctctctccccgctcctcaccctcctctctggagggcttttctcccaggctctgcacagctttttatttctgcttccacagttttattttccaagaccgctcttgttctctcatggatacaatcttattattattttatggatactatatcttctcttatttttatgaagctataagtgactctttcactaagcttctccttgaattgtctgtttcaggggtcatcaaactagggccagcgaggcctatttttatagggcccccaagctagaaatggttttcacgtttttaaagggtttgagaaaaacaaaacaaagaaggagatgggacatagacaaaagcggccgcaaagcccgaagtcctcacagcttggccctttacaagaagcagccccgcggccctggtctctccttccaacgccactgcccctccgcgtccccttccgacgccactgcccccgttccaacgccactgcccctccgtttctccttccaacgccactgcccctccgcgtctccttccaacgccactgccccccgttccgacgccactgccctccattccaacaccactgcccctccgtgtctccttccgacgccactgcccctccgcgtctccttccaacgccactgcccctccgcgtctccttccaacgccactgccccccgttccgacgccactgcccccccacgtctccttccaacgccactgcccctccacgtctccttccgacgccactgcccccgttccaacgccactgcccccccgcgtccccttccgacgccactgcccccccttgtccccttccgacgccactgcccccccgttccaatgccactgcccctccgcgtctcctgtagacgctctgctcaggatgcggggcgcaggacaggcgcttcctggcctcagcgtggggtggcccggccgcttctggaagacccctggcgctgtcccccgcctccccgggctgtcactgccgactcgggcctgcccatctcccgcaggggcgctcgggcctggccgccaagctgggcgagaggccggggccccccttccatcacgaggttcctgccctcggctcggcctagtttccctagccaggagaagtcctgttttcaacgttctagaaatatccccgcccggctgagcggggggaggcggagatcctgagtgtcgctgctgcctcctttccgtgcacacaggaaaccacacatctgacacgcacaagccaacgaatttcccccgaggaacacgcttgtgtgtccagcccccaaaacaagaacaagaacgtgggcggcggctgctcgggagcccccaggcccgcccaggcaccacggcaggtcccgccccacttccagccctgcagacacgctccttgaactcgactccttcagctcaacctgccctttcaggagtattttacatcttattttatttatttatttattttattttatttaattgatttatttagagacggggtttcgctctgtcgcccaggccggagtgcagtggcgtgatctcggctcactgcaacctccatctcccgagttcaagtgattcatacgtctcagcctcccgagtagctggctaatttttgtatttttacaccacgcctggctaatttttgtatttttttaatagagacagcgtcttgctctgtcacccaggctggagtgtggtggtgtgatctcggctcactgccagctccatctcccgggttccagtgattcatgtgtctcagcctcctgaatagctgcctaatttttgtatatttacgccatgcctggctagtttttctatttttagtagagatgaggtttcagtggtggccaggctggtctcgaactcctgacctcaggtgatccacccacctcggcctcccaaagtgctgggattacaggcgtcagccaccatgcccggccttatttattttcttttattatttaattttatgacagggtcttactctgtcacccaggctggagtgcagtggcacgatcacagctcactgcaaaccccctgtgcttaagcaattctcctgcctcagcctccccaggtagttgggaatacacatcaccatgcctggctaatttaaaaaaaaatttatgtttggaaagatgatgtggggtggtcttactgtgttacccaggctggtctggaagtcctgggctcaagtgatcctcctgcctcggcctcccaaagtgcccagccgacggttcaggtgtgtccgtgtctcccaggaacgagtttgctcagtcacgttgctctgccgtatttcactgtactgaagagactgctttattcatccctcatgttgttgataaatagaatatgggtttttcccagtctggggcggttacgagtggcgccactggaagcatccctaagcgggccgtggcgagggacccacggaagcatctccgtcggggaaattgctcaatcggagcacatgcactcggtcagcttcagctgacgctgccagacggctttccaaagtggcgagcctcatttacaacgtcaccaggaacacctgagggttcaaaccactgcacctgctcaccagggcctggctttcttcctttcaaccattctcatgtgttcggtgtttaaaacgctgagattaggccgggcgtggtggctcacacctgtaatcccagcactttgggaatctgaggtgggcggatcacctgaggtcaggagtttgtccaccagcctggtcaacatggtgagactccatttctactaaaaatacaaaaattagctgggtgtggtggcacatgcctgtaaccccagctactcaagaggccgaggcaggagaattgcttgaacccaggaggtggaggttgcagtgagctgagatcacaccactgcactccatccagcctggacgacagagtgagactccgtctcaaaaaacaaaaaaaaaaactgttgaggtttgtttttgcttttgttttttaaggctagtcaagtgaagcaatgcgagtggagaagaaacaacaaaatctgtaactggttgtgatgaattagttctaaacaccaatacactcggaccagcctgaaatgtggagagtttgggctgcgtttctctgatgacgaatgaagttgtccatctttcatgcgtaattctcttttcttacagccccttttcgagttttgctgtcaaggtattactggtgttttaaagtgaggtagggtttcctctttttctactttctggtaagaatttggtactgatggtattatttcttttttttttttttttttttttttttgagatggagtctcactctgtcacccaggctggagtgcagtggcgcaatctcggctcactgcaagctccgcctcccgggttcacgccattctcctgcctcagcctcccaagtagctgggactacaggcgcccgccaccgtgcccggctaattttttgtatttttagtagagatggggtttcaccttgttagctaggatggtctcgatctcctgacctcgtgatccacccaactcggcctcccaaagtgctgggattacaggcgtgagccaccgcgcctggcctaattcttctttaatgtttaaaataattcaccaatgaaaccatctggaccttgaatcttcttcaggggaaaatgttaatcaatttaatttcttttttttttatttgagacaaggtctcatttctgacgtccaggctggagtgcagtggcacaaccataactcactgaaacctcagtctcctgggctcctggaatcctcctgcctcagccttctaagtagctgggaccacgggcatgcatcaccatgcctggctactttttctgtgtgtgtttttgtagagataggggttccaccatgttgcccaggctggtcttgaactcatggtctcaagggatcctcctgccttggcctcccaaagtgctaggattacaggtgggcgctaccacacctggcctttcagtttctctaaagcatgcaggaccattcagatttttaacttcctgttgaatcagtttcaataagtattctttttcttatttgtccatttcatctaaattgtcaaatttatcagcaaaaagttggttatgatctcctcttactactaatttttaatttttactgtggaatctgagtgatggcctcctttttctgatactagcaattgtgttttctcccttattcaactttctatttttattttattattattatttttgagacagtcttgctctgtcacccaggctggagtgcaatggcatgatctcggctcactgcagcctctgccccccaggttcaagggattctcctgcctcagcctcccaagtagctgaaattacaggcacgtgccaccacgcccagctaatttttgtatttttagttgagacggggtattgccatattgggcaggctggtctcaaactcctgacctcaaatgatccacctgcctcagcctcccaaagtgctggcattacaggtgtaagccaccacacccagcctcttattcaacttttcaaagaacccactcctggctttattgcttatctcaaccctgtttgcttcctagttcactgatttttagctctcatccgtcatctcctctgctttccttgggtttgatttgtcattctctttcttacctcatgattattcattcttggccttccttgttttctaacatatacatataaggctataacttttcctcttaagactgctttaactgcagcccacaggtttggatattttgtatcttcattgttgccaatgaacttaatgctgagttggggttggcaagcttttggtgaggctcagacagcctctgcttcatccttaccccaaggttcttctttctctctctctctctctctctctctctttcctttctttctttcttttctttctttcatagttgaggtcttcctctgttgcccaggctggagtgcagtggtgtgatcatggctcactgaagcgtttaattcctggactcaaatgatcctcctacctcaacctcccaagtagctggcactacaggcgtttgccccatgcctgcctctcaccccagtgtttccactgggggcctggtgtttacttcccaaggggtcctggactcgtcatctctgtctcctctacactgtgaaggcaccacagattccactccccttttcaatgcttttggttccgttttaaagcctctctccatcgcactccctggagattcagaatgttggcaagtgtcttagggaaaagccggccatgcaattcaggcccctgaagtctctgagcttgcctccctcctgtgagatggccagtgctgtgctgttccagtttctgtttccccaccagtggcccctgcctggacaaagcctagattctcagcctcacaccgtcacctgctcccaggacagcaaatgtccccagggaaaagcaacaggaacttcagtcagctctttgtggaggctcactctctcctcatccttcaggagctcgctcacgcctttcaacagatgactttgtgtttctttccggctgtgcgggctgtcctcagtggaactgcaggctcagctgctccatccaagcctcagtgcttgccacaatgtctatcaactgttcttctgttttagccccatcttgacatcggtgtccagaggtacctggtgccaccaattcctgagcctcttggtggcttcctgtaaactgggttgcttctcaggagtcagattgcttttttcttttttgtagagatggggtctcgctgtgttgcccaggctggtctcaaaccaatggcctcaagtgatcctcccacctcagcctctcaaagcactgggaggacaggcatgagccaccgtgcctggccgagtcagctttcttcaatctgctaaggcagttcacccatctgctttctgccttccaaaatcgcattgcttttgcctcctctagattttatcctcatgggtttgtggcattaaaaagcattgctttacttctgtttagtgatactgtaggagaagcaaactaaattcatgtgttcaatctgccacacgtaggatccagacagcctcattttacgaattttctacagtcaataaaaatgcttcactttttttttcttttgagacagggcctcactttgtcgctcaaggtggagtgcagtggcatgatctcggctcactgcaacctctgcctcgcgggttcaagcgattcgccctgtggccactgtcaccatcacagtacagcatgttcagcgttttccaggcaggagaggaaaccatcggtctatttccattaattacctgtgatgactgtgttgggaaggggggtggtgagtggctgactgtgttgggaggggggtggtgagcagcgagggaagcagggaggggcatgtcggtttcccattgccgttgtgacaaatgcccacacgcctggcggtcacggccacacagtgcactctcacagctccgcggctccacagctcagccgggtctcacagagctgacagcaagatgaagcccccgggggaggatctgtctccctgctcttccggttgctgtcagaattcagttcctgtggttgtaggactggggtcccgtttccagactggctgtcagctggggtcactccagcttctagaggccactgcactcctgtgctcctggcccctcctccagcctcagagccacatcccctcttcttctgtttctctctgaccttctggacttgtctgagtggactgggccacccggatacccaggtcatctccgaatctcaaggtccttaatcgtagtcacacgtacagaggcttctttgccatgtggggtaatacggtcacagggtaagacggtcacgggtctcagacatctttgggccattatcctgtctaccgcaggtggacacagccatggaatggaagcaacttttctgattacctacggtagctttgaggtttccagccaagaagccccgtcccggcccccaggcttggtttgtgagccagggacccacagcatgtggccccgcccctccccacactcgccgcctcccatgcgcacccctacctggatgagctgggccctgggtgtggccagcaggttgagggtgcaggagagcttctggaagaagtgctctccagccgccccgaagccggcgctccgcatccactccaggagctgctgcaggcgggcgcaggcctggacacctctgggccagtggaagcagctcagggaggggcctgtggagggaagaagggagggtgatgcctgggctgccctcctggggggacacagacatgggcctgtccccagagcctgcccttcccggctctgggccactgaggacatcacagctcgatgacaggcaggacaccttccctcggttttcaaggcaactgaccagccttgaacccctctctggagcgggggtacggtgggaggtgaacgtagcagggcagggtgggctgtgactgccgctgactccacagtgcagcccctagctgggaccctctcccactcccagacacatgtgccgggggcctgcccccacctgggtctccccacgccccacagtggccctggctgggagtggccagtgctcctgagccctgcaggtgatgggggaagtcactccacaaggcagggtccaaggccagagtccgcggctgcacagacctgggttccatcctggccctgacatgtccaccgggcagttctgggacagtccaatgatgccctgagcccgttccctccctgtcacggggaaggggtcccatgcagacctctcggccgtggcttctctgaaaccccgatgggaccctggctcctacgggatgcgctgtgctgatctgtcccccctcactctggcctctcacccctcagggacaccagacgctcagggagcaggaggccaaaaagggcagagccgcctccaggagctggcgagggaggcgccagcagccgtcatgtccaggaatgtgagcccccgacccctcaaccctgcacgaggccctcacccctgtcgaggagctggttgagaagcagtgtcccggagaagaagaagaggtaggcgagcatctgcgaggccacctcggggtgcacctgcagctgccgcaggaggtccagggctgcctggtacacagacaccacgcggcgcagctcctcgggcagttcgggggccgaggaccagctctcacggcgctccgtctggaatggcgggcactccaggagtgccgggaggcagatgtacagggactggcgggggcaagaggagaacagcaaccagcatttccaggagcgctggcggccgaacggggggcctgacccagcgagctccccacccacgcactgcttgcagggacccggcctcggtagcttcctgctggacaggccatggctttgcaaatgtccagtgtgggatgtggggacacaggagctgcctcctggggctgctgggagcagaggtggggtgcagggggctcagggggatctgctgtcggaggcacagatgaactcagaaggcgcacagaggtggcgcctggggggatgggctccaacaaaggggctccaacaaaatgacgggagagtcaccactcccccagaaagtggctcaccgcacccccgatgcaccccaagctggccagggccacagggggaccggcggcagcacctctggcacccgtgggtccagggtgacaacagggccatgtcccttgcgccccatgctggggcctcccccacctcatccctgaccctcgaaatactggcaggaagggggcgtttcaaggcgagggaaagggagctgggatggttctagggcttctgtgcgacctgaggaggagcgggtgtggggggtgcagctgggcctgtgcagaacctgcagccactgctccctgatgaagtggagcttgtcacggtcccctccctcagccccccagaaggctccttaggagagccacaggcacaagcttgagccccacttgatcccaggagctgcctgagtgcagaagcagagcccgtccgtgcaccttggagacatagtagacgcactgctggaaggcgtacagcaccacctcctccagcaccgccatggcctcctcgctggccgtcagcgtgcaggagaacagcgattccttcgagcctgccgggagacagccacgccaatggtcacaacgggcacagcgctcaggaacgcagcaactcagccagccgccagctctttccctggcgcgggcaccacccaacgcgcccatctggggtccagatgcgataaactggccgagggactctgggccctggctgggacgagcgcagcaaacctgccgccactcttacctggggaggggaatgccgggaggggcaggaggggtccagacacccaacatctcaatgcccagcccagcccagcccaagcgctcattcactcccacgttctggatacgttttctgttacaaccaactgcacccaacatagcaggtcctaactgcctccccacaggtcacctctcactcgcgacacgggtcacaggactctggcagcagcccctgagtggccgccactctgtggaatcataagtcttttgggaagaaaaagcccaaatcagctatttcacccccacccccgggtgtcagccggggcggctggagctgaggctggggggagctgcccacggagtggttcctgccgtctgggtgggggctcttgtgaaggtgggaggcccccaacagggtggagccttccccgggggcttccagaaagtgagggagcatgtggtggtctcagtgactgagggtcccatcagcacctggggaaggggccaggaccctgggtgttccgcctttgggcgccttcattctctcctgggactgtgggcggccaaccacagtggtgttccctgtcagccgcgtgggcggccacagctcccctcctctccctcctgtggggccttcttccaggaggggcagaggggccgcatcgtgggggctgcctgtccaggccgcctgccagggctgcatgggcggcgcctggtgagccaggccaacactcaccccagcgcgggcctcccaggagcacaggcccccagctgcccctctgccgggcagactgcaccggaggccggcccactcatggccaggacaatggtgcgccaagcccttggacaagcccctgtcactttcgctctgccgctcctggtgctcctccttcaggggcttggggctgcctggcccccacccaccaagcccgctccccaagaacctgtgaagccccccagtgcctgccccacagggtcacatctgggaaccaggcagggcagctggagggaccccggggtccggggcagtaaggggctctcgggctctgccaacctcaacactgtgcccagaagcctccaggcctgtggagacacacaaggtggcccgacggcgcccacagcgagtgccggcaaaggatattcacagccacggcaggcgggtcaggaggctgagctctgtcccgtccacctgtcctggtgccctgaccctggctgcctcaggctgccaggtctgagaacccagccccacatcactccctgggcaggggcggggcactggtgggaagagggaaacggggcatgggaatgacaggagaaggtggcagggactgtgctgaatgaaaccacaaagcagcctccagccacccaccacgggcctgagactccatttcttcttttatttaatttttggtagagatgggatctcactatgttgcccaggctggtctggaactccaatctacccgccttggccccccaaagtgctgggattacaggcatgcacccctgcacccggccctgagactccatttctctctctctctctctcttttttttttttttttaaagacagagtctcactctgtcgcccaggctggagtgcaatgacacaatcccagctcactgcagcctcagctttccaggttcaagcgattctcctgcctcagcctcccaagtagctaggactacaggcacatgccaccatgcctggctaatttttgtatttttagtagagacggggtttcaccatgttggccaggctggtctcaaactcctgacctcatgtgatctgcctgcctcggcctcccaaagtgcggggaggacaggtgtgagcccagccctgagactccatttctaaacccccggagacgcctctccctgtggtaccagggctggtgggcatttctgaggatttccgacgcccacgagccattaagaggacacaccagccggctgcccctgccctgccccgaaactccaggacccctgaggaagctggccctatccctaaagaagaaggcgctgagctccagccacgaggagaatctgaggcgcacacgatggtgtgaggcggcgcgggaggggcctgggtcagagctttgtacaaaacagtgtttgcggaatgacaacagccacgtgacccaccctcgggacgcgacagccctgctctccgaattcttcccacagacatttcctgcagagggtcgggaggctgacggggctctgcccctccggccccttctaggggctatttcccactctgttccctggtgcctgcctggccctcgacacccggagcctgcaggcatccctgggccctggctcccatcgccgggccaaacactgctcaggcccctgaccaaaaataacttcctcccaagaccaaaggcagcagctccaacagcccagagcaatttttcccatgaagagcagccagcacggggaccacatgggacccagctgcctgcggccaccaaacccaggcagccacgaagccacgtggaaagtcagccggggactctccaggaacacagagccgaaaaatcacaggtccctgagctgactcttcctgtgggggccggaacaaaaggggctcctaagctggccccgtccccctgtcacacggaaggaccaagtgcactgcaaggtcagtgagggtcacccttggccggccgcaactccggagttgcctccatcccagggccacctgccggctgcaaatccagccctggaggatggcagagtcaggtctgcagggagaggcgacgggcgctgtagtcccgggagcccaggagccccaggggaggcctgtagctgggcagctggaggtgggaaccttgcgtggagacttagggacccacagtcgtttacgtcactttccaggaaaaagccagaggaaaggtctaccctaggcccaggccccatggacaggcaggggctgccccatcacgtggggggcaagggcacaggccagatgcccggatgcccaccaaggccaggaggggttgacactacccccacatattgaaggcagccccgattcccaggactggggagaccctggcagatccccacatccccttccctgtgaaggaggggagaaggaaacagtgggaaggaaccgtggccggcaggaaggaactcggacagatcctggccggctctgcctcccccaggagcgggggccccaccccacaacctcatggccagggccagcccggcctgttccacgcgccctcagtccagcctggtctctgcagcccggcccccgcccggaggctgaggactgggccccgacgcattgtgggagcctgtcccaccacagggtcactgtgcagatgccccgccacctccctctcaccacggagagcccctcctctcaggaaacctgcccctaaggcatgggggggcacagcagggtcccagcgcccccaacacagcctggccagtacctcgcctggccttgtgtcctccgggctgtctcagatgcagccacagccacagccccctcccagggatggggacacagctgagtacacagagaccccgcagcgtctggtagactgagcctgtgggagctcctgtccctgcacaccgggcctgcgcctccctcgaagctcagagacgcagcctggagcagctctgaatgcaccactccctacccggatcctccagaagccagaccgccacgccacggccactcaggaccctctggcactgtgcccgcctgacagcccaccccacagatgtgagggcagtgggtggacagcaaggccgttgggggcagaaccaaggcttcccatgagaggtctggcccccagttccctgggccggctcctcacttccgcagcacagcagcacagtcctgctgccccgtctggctccattccaggccccacacagtccttagcagacacatgagccgaaatcctaccccggcttccgggcccggccccatgccaccttcctctcgaagccccctagactgccccgatggaatccctctcccttagtattttcagaacacttcctactgcatttcagaaatcctgaaatggtggccaggcacggtggctcatgcctgtaatcccagcactttgggaggctgaggtggggcggatcaggagtttgagaccagcctggcaaacatggtgaaaccccatctctaccaaaaatacaaaaactagccgggcgaggtggcatgctcctgtaatcccaggtactcgggaggctgaggcacgagaatcgcttgaacctgggagacggagcttgcagtgagccaagatcgcaccattgcactccagcctgggtgacagagcgagactccgtctcaaaaaaagaaaaagaaatcccgaaatgtgtatttcccacatcttaatctgtgaaaccgacataatctacaatttcacaacaatgactggcaacatctgtccttctggaataacggtgtgtctcagaacgggcggcggtctcatggccgacgctctctctaccgccccttacatttggttcacggtggcatctgtgtctcccctactgagtgatctgtgtaccccccgggccctcctgcaagcagaagagtggggctgcggtcaaggggacgccaccgcacggagcacacgggatgatggggacagactgagtgccaaggtgctgtggggggaggtgccagactggcccgtgccaccagcaccagcctcacaggccgtccccgagcaactgacacatggcagcctagggactgaggaagcccccggcatgaatccacccctgctatcatggccaactaggttccgaggacggcgaggagatgccacactcccctgcctggggtgctggcggggggaatggagggcagcgccagccgtacctgtgatgtccagctgctcctccatgctctgcatgtagagtgggcatttctgctggataaagtacaggagctcgatggagttagacatccagaaaagaatgggctgcaagtctggaaccagatcagccatggcgcagctggccagcgagatgggctcctggctaccaagacagaaagactaagagttacgcggggacccgaccctcaggaggctgaatctaccactctttctacataaggatgcgcgttttcatgggacgctgacaacaactgcaaccatcaacctgacactgctgggcggggacgtttaacaatacgtgtacccgcctggcacctgcctacaacacccgacagccagaggaccctacaaacctagcaggaagacagctgggcgccacagccattggtaaaaaacctcggtaagtagatggcttgcatgtcttctcttttggaatgagatcataaagtggctgtgaatgctgagagaatgtgtgccaatatgtgtgtgtgtgcgtgtatgcgtgcatgggggtgggggctggtccatggttttcagaacaagaaatgtcagttccattatattatttaagttaacaaggtaattaccaaaggaaataaacaataatagagctattttgggaggtgcacaaaggcaaaatgaaatgctactttattaaagcaggaagtcagaaaatcacgtgtaaagtccatgaatcgcggggtagcaggcaaagcatgagatttgaagactcagaggcaatcgttagaaacccaaactgaggccaggcgtggtggctcacgcctgtaatctcagcactttggaaggccaaggcgggtggatcacctgaggtcaggagttcgagaccagcctggccaacatggcaaaacgccgtctctactaaaaatacaaacattagtctggctaattattaaaaacctttttttttttttttttttttagagacagggtcttgctatgttgcccaggctgctcttgaactcctagccttaagcaatcctcttgctttggcctcctaaagtgctgggattataggcatgagccaccatgcctagccctgattctgtatccatggggttcattgttactctgagtaacaaaagcagaagtagctcaggcccctgcctggccagcccaatgcaggtaggggttgggggggcgcccttccctcccaggcctgctgccttccggctcagtgctcccttttcaggggatgacggcatcatcagggctgcctcctccctcagcggcagcctccaccgtcaggctggcttccaagctcagagctcccaaaccctttctcccacatctctggcaccagccgcaggatgtgtctgtctggtgtgacttgacactgccttctagtgtcctcagcagcctcttggaacgtctgaggggtggacgtggcaaggctgtgctgaggtgcccgggtaattcctcatttaaaatgccagccacacatctttctcacaggttgctcatctggtccatgcaccagctcagcattaagccactggacaagatgcctgggacgccccagggtcctggcagctcagaggatgcattcatccctaagtctccataatcgcacctggcggacacaaatagccgtgtgcccctgagcagtgagcagaaggccgtgtgtgcccctgagcagtgagcagaagggatccttttgcaaacagatcaaatcacacagatctgacttgggtctgcctggggtgtggagggcggccctgctgcctgccccatggctggcccgggtaccccttgtcacctgtgtcccttactggggggattctaaggggtgagccaggcagctgccactctgctggccgcagggcatggtgccagcccagtgcctgaccccagtcccggggcagagccaggctcaaggctggacggccgtcagagtgaccatcgcgtgctcagtcccaggtgtgtggacccggcctggggtcctttgaaaggtgccaagcccacaggaaatgccaccaggaccttaaggcagccggtttgtgagggcatctgggaagggctgaggccctgttttcctccctgttctttccccagctgggcagccgagcagggctgggggaggaaccccaggctgcgtcccagattctccccggtacccaaagtgttgcctgctctctctgacgtcacttcacttttgtccacaaacaatgttgacctctctcgcgtgcacacacccggggagggaagaaactggactgagaccatctctcctgtttttggcggctaagcaggtccgctgcctgctcatgtgtctggcacagctcaaagtcctgctcctttttgcccattctggacactggcttgaaggacacgcatgtctgcagatgggcagaaggagctttttatacagttaaagaaggattcgctgggctcttcggagactaattccatcttgttttcaaaatttgctgcccttctcaatttcaccggaacccggagggtagacaggcctgtcccaggaaacaagtgaccaggctttgcaactggagtttcgggatcagactcgggccaggttggcactgaacgcgcccccacctgccaacctggggccatgtgagtgggggcccagggaatgatgaagatccagcccatcctacccaggcctgtgtggacggaggagcaggtctggtggaaaaggaaaacccatgttgttctagaagagggcagaggggaagggcactcggggggggacagcacagcctggcaggaggaacaggcgtagctggctggggcagttctagaagagggcagaggggaagggcactcagcaggggcagcacggcccggcaggaggaacgggcgcagctggctgaggcaggctggtcaaggcgcgggtatctcctgcgggtggagggaagcactggagtcccactcctgggaaccaaggcgatggaaacactcgcagggcccacaaggagcacagagaccagagcatgggctgccggccacagcctatgcatgcctgtcgcgtccatcaggagaggaccagggaatggcgtgccccaaaaaatgggtcagccacatccacccacctggagaggttgtgagtgagaaagcaaaccacagacagctcagccagcgccatcacacccaggaagaaaggaagaaagaaagaaaaaaggaaagagagagagaaagaaaaaagccgggtgcggtggctcacgcctgtaatcccagcactttgggagggcgaggtgggcagattacaaaggtcaggagttcaagaccagcctgaccaacatggtgaaaccccgtctctattaaaaatacaaaaattagctgggcgtggtggcatgttcctgttatcccagctactcaggaggctgaggcaaaagaatttcttgaaccaggacccgggaggtggaagttgcagtgagccaagattgtgccactgtactccagcctgggctacagagcgagactccgtctcagaaaaaaaaaaaaaaaaaaaaaaaaagggaaatgaaatggtgaatatgttgcaggaaactgttaaaggtgctctttggggccaggtgcggtagctcacatctgcaatcccagcactttgggaggctgaagctagaggatcacttgagtcttgtctctacagaaaaaatcaaaaaattagccagggcatggtggtgcatgcctgtagtcccagctactcgggaggctgaggcagggggatcacttgagcccaggaggttgaggctgcagtgagctctgactgtaccactgcactccagcctgggcaacagagtgagaccctgtctcaaaaaataataattaattaaattaaatgaagtaaaaacaaagaatgatttgagacacagtagtgttaaaagcaagctgaagctggaataatgtcagtaataaaatgaaagcccggaagtgaggatgggggtcgaagcatcctaagatctagtgttccacaaaaggaggaagatattaatattttcagaattactttgaaactaataaagaaggaaaaggggagtttttaaaaatccagtcagaagccagttgtgatggctcacacctgtaatcccagcactttgggaggctgaggcgggtggatcatgtgaggtcaggagttcgagaccagcctggccaatatggtgaacccctgtctctactaaaaatacaaaaattagccgggcgtggtggcgcgtgcctgtaatcctagctactctggaggctgaggcatgagaatcgcttgaacccaggaggcggaggttgcagtgagctgagatcgagccactatactccagcttgggcaacagagcgagactccgtctcaaaaaaaaaaaacaaaaaaaaaaacccaatcagataggaaagtataaaaatcaaaggcaaaacgcacagaaaatagtgcaaaacagatggtaaaaatgtggccaaagacatcaggaatggcaataaacctaaataattcgacttgcccattaacaaagataagacaggtgaacaaacaatggctttcaaaacataaaacaaaagggcacagaaagagtgaacctaaactttccctggttccatggacgggcatggaaaaatctgatgaggcgagtagtaaaccagtgaaaggggatgtggtactcactccagggaaagaaagattctaggccaataagaatcatcaggacaggccaggagcgtggctcatgcctgtcatcccagcactttgggaggccaaggtgggcagattgcttgaggtcaggagttcaagacaagcctggtcaacatggtgaaaccccgtctttactgaaaatacaaaaattagccgggcatggtggcaggcgcctgtaatcccagctactcaggaggctgaggcaggagaatcgcttgatcctgggaggcggaggctgcggtgaaatgcgattgcaccagtgcactccagcgtagacgacagagcgagactgtctcaaaaaaaaaaaaaagggccgggtgcggtggctcacgcctgtaatcccagcactttgggaggccgaggtgggcgggtcaccagaggtcaggcgatcaagaccatcctggctaacacagtgaaaccccgtctctactaaaaatacaaaaaattagccgggcgtggttgcaggcgcctgtagtcccagctactcgggaggctgaggcaggagaatggcgtgaacccaggaggcggaggttgcagtgagccgagatcgtgccactgtactccagcctgggggacagggcgagtctccatcgcaaaaacgaacaaaaagaaataaataaaaaatgaagtaaaccaatcttcattaaagaaagggattcggccaacacgggtctccctccccgaggactctggcccggatgttcttccagcaaaccttcagggccagcccttacctcatacaaactgatctggagaactaagaaacggagaaagctccccaattcatgttctgtgaaccttgttactaaaatcagacaaggacagtgcaaaacaaacaaacaaacaaacaaaaaaaaacgtagaccagttttaccgataaattcagatgggaaaatcctaattaaaagatcaacagtcaacatcactaattctcggggagatgccaatcaaaaccacgagacgccacctcactcctgttagaatggccattatcaaaacaatgacagatcacaggtgttcaaaaggactgcacgctgttggtggggatataaattagtacagcctttacagaaaacagtatggaggctcctcaaaatattaaaaatataggctgggtgcagtggcttacgcctgtaatcccaacactttgggaggctgaggcgggaggactgcttgagcgcaggagttcgagaccagcctgggccaacatagtgaaattccatctctacaaaaaacacaaaaattagctgggcatggtggcgtgcacttatagtcccagctgcttgaaggctgaggagcgggaatcgcttcagcccaggaggtggaggttgcagcaagccgaggtcgcgccaatgcgctccagcctgggtgacagaatgagaccctgtctcaaaaaaaagaaaacctaggaatgtagcactccacattaacagattaaagggggaaaatatgttgatcacagatgcagaaaatgatttagtcaaattcagtgatcattcacaatttgaaacacagaacacaaagatttgaggcaaacagggcaaacaaaatgttagtaatattaaatcccaaatcatcatcatcataacatcagtttcaggtgtgggatcacgggggagtgacagattccgtactgttctgtgttttggaagtgattcattattttacaaaggaaaaaggaaaagccccccaggcatgcaagagggatggaaacggctgtttttaggtcctaacgatgacggttctggaacacacagcacgagcgggcagctgcagcagggagggcccgggccttcccgtcaacgaggaagctgggtccacccagagctgcgcttcagcttcaaactgcaggctgcccagcaaacaggcactggggtggaaggttccagtcctccctgcacctcagcacttaggaggatgagggctgggtacactcccatcccctccacaccctgcctcaacactagaactccagctgtcctggaacagagccccagagggaggccaccacgcctgttactgggcccactcccaactcccatgcaaacttctcctcaacactgaaagcccacaagatgtcaggtgccactgtaggggcccgggcctggaccacctccttgccgtgggtcaggctgtccatcacccttcgatgctatccggggcctggcttctatggagccccctcctgtcaggctgggaggcagagcctgggtccctcacacagtcccagatctcagaggccaggacccacccccagtgcatggcatcgggacctggctctggggagcgggtgtttgccagtgaaagtggaaggcgttcggagctcagctctccctgggccgggcagtggggatgctggggactccaggtcagtggtccccaagctgtcccatgcctgtccctcctacctttgaaagaaggatggacccagggtggacatcagcaggcacatatggcaataatgggctttatggatggaccatttttggtacgtgaggcacttacagggttcggctgtgtctcaacccaaatttcatcttaaattgtagctcccacaattcccacatgttgtgggagggacgcggtgggtggtaactgagtcatgggggcgggtctttgccatgctgttctcccgatagtgaatgagtcctcatgagatctgttggttttagaaagggtggttcccctgaacacactctctcgcctgccaccatgtaagatgtgcccttgttcctcctttgccttctgccatgattgtgaggcctccccagtcacgtggaactgtgagcccattaaacctgtttcctttataaattacccagtctcggatatgtctttattagcagcgtgagaacagactaataaaggcacggatgggaatcacgcaaacctctgtgtaccacagcttgacttaagggggtgctgccagccactcagcctgagccccccagacacaccccctccctcactgcctagcgtggccaccaccttccactctgccttcgtcagtgttatctcacgtgtgtgtcttaaacaggatggcttggctgtgagtatcatacgtacgtgtgtgtgcgtgtgggcatttaaccatatcacagacactgtgctaggtgctttttcccaacattgtcttggattcagctgcactgagagagcagtggctgaaagtcattccctgccaccaggaggagacatgtggcggcttcagctcctgtgcggacacactgccttccaccagcaggtgtctctctagggcccactcgagagtgggagcgtaggccgcaggggctgcacgtctgtatcagatcaaccgaatggtttcccaagtgccccagcagcgtctagggtagagatagtgctttctgcgcaaacagccgttggagagtggcggtgcactaccttacctctaacccaggagctgcgcctttccctgaaggagcaggttagttctaacacagaatcgggagagcaagggaggagaaggctcaaaagagggcctcgtgcagccataaaaaagcacgacatcagccaggcacagtggctcacgcttgtaatcccagcactttgggaggctgaggcaggtggatcacctgaggtcaggagttcgagaccagcctcaccaacatggagaatccccatctctactaaaaatacaaaattagcggctgggcgcggtggttcacacctgtaatcccagcactttgggaggccgaggcgggtggatcacaaggtcaggagatggagaccatcctggctaacacggtgaaaccccgtctctactaaaaatacaaaaaaacaaaaattagctggccgtggtggcgggcgcctgtagtcccagctactcgggaggctgagacaggagaatggtgtaaacccaggaggcaaagcttgcagtaagccgacactgcgccatagcactctagcctgggcgacagagcgagatgccgtttcaaaaaaaaaaaaaatacaaaatcagctgggcgtggtggtgcatgtctgtaatcccagctacttagaaggctgaggcaggagaatcgctcgaacctgagaggtggaggttgccgtgagccgagatctcattattgcactctagcctgggcaacaagagcgaaaccccatctcaaaaaaagaaaaaaaaaaaaaagcacgagatcatgtcctttgcagggacatggatggagctagaggctattatgcttagcaaactaacacaggaacagaaaaccaaataccttctcacttacaagtgggagctaaatgatgagaacacatggacacagagaggtgagcaacagacactggggcctttcagagggtggaggctgggaggagggagaggatcaggaaatataatgaatgggtacaaggcttaatacctgggtgatgaaatcatctgtacaacaagcccgcacgacataagtttacctatgtaacaaagctgcactcgtacccctgaacttaaaataaaagtggaaaataaataaactaataaaattgtgaagattctcaaaaaaaaaaaaaaaaaaaaagccaggcacagtggctcacgcctgtaatcctagtactttgggaggccaaggcaggtggatcacttgagttcagtagttcgagaccagcctggccaatatcgtgaaaccccatctctactaaaagtacaaaaaaaaaaaaattagccaggcatggtggtgcacacctgcagtcccagctactcgggaagctgaggcaagagaatcccttgaacctgggaggtgtaggttgctgtgagcagagattgcaccactgcactccagcctggcgatagagcaaacaaaacaaaacaaaacaaaaacaaacaaaaaaagaagacctcacccatccagtcttaagggtgccctgaagcaatttcccaaaactcagagcttcccagggtgatgactaaagaagcaaaaaaggccgctgcttggatggaaggacaaagcccagagctgaccccaaggcgtggggagacccctcgggacttggctcccccgggaagtgtgagcccccaggacctgctgcccagaggcgggcacaataaccgggtcatactcacagttgcgcctgcttctctgctagttctttggttttctcctacaattacaaagcgggagaaaaagcaagtgagcaaaacaggctaacacagggacgcgttcaaatacacgataccatcgacaggaaaacaagccatgctgccccaggcatcctgtgtgacgctgactatttattcaagctgtgctggaaaggacattttccatgtgacttcaacatcttcccattccattaccgactatgacctacaagtttgctacaatagagtatctcacaactctctagcttacataacaaccggctatttaaaaaatagtagaggctgggcaaggtggctcacacctggaatcccagcactttgggaggctgaggcaggcagatcacttaaggtcaggaattcgagaccagcctggacaacatggtgaaaccccatctctactaaaaatacaaaaattagccgggtgtggtggcgcatgcctataatcccagctatttgggaggctgaggcaggagaatcccttgaacctgggaggcagaggttgcagtgagacgagatcacgccaccgcactacagcctgggtgacagagcgagactccgtctcagcaaaaaaaaaaaaaaaaaaaaaagaattattcttgccttagtagtaagttattatccggctgaatgtaaccgtgatggctgagtgcgcgtagactaagcgtgtatatttggtaaggaatgaggacggggcagcggcgacacagttgcacattctcaggaaacaaacgcgcaaatgatattcgcatgggatctggacagcacccagcggaggcttcggattcccacagtgggtgcagggggaagaggtggactcaggctcggtctcatgtctatcagctcaatctctggaccaggcaattcacctctgggagcctctgtttcagagcctgtagcataggggcagggtgagccctggtgtgctgcagggagtgggccagccacacagcgagccccaggtggctgggacacaggctgggacccgggtccctcagcaagtgacttacggccccctggcttcagtttccctggctgtgacatggggtgtggcatctacatcgtcagggtggttgtgataaagaaattaaacagcgtttggtttgcaagtaagtgcctggcgcagaggagactcgggaaatgacaatgatcgtgcgaaaacccatgacttctggccagcaggtaactctcggtcacagtggccacgatgtggacacacactacagggacatcacctggccctgtgtccatgactgcacggaggggacacgggcacgctgcagtggcactcccatcaaatcccaagccgggaacccgaggggaagaggcacggacacccagattacaacacccacggtgcacagagacggctcccactgacatctggacagggaagcctgagctggcttttactttttaaaagtctcagacatttaaaatgtggatttcgatatgagaaagtgataaggtttctacacagtcaagtggttcccccttcccctgtctgccggggataagcggggcccagactagcgaggatctgagggtctctgaacgaacttgaacaactacgagttgtccttcgggtccctgggagccaagtcactgtggggtggggcccagcggggggccatgactgtgtgatgcctgttccagcactcatgggcccagggcggtcctgctcactggcggccacactggattcctggggacattggcaatgcctgcagccatgggtgtattgcgtgtgtgtgtgtggcggggcggcagagggtgaccggcatctaggggtggaggccggggatgctgctgaatcctctgcaatgcacaggccagcctcacagcaaggagctctcctgccacagtgtccacagggccggggatgagagaggctggcctggaggaaagttcgtcaacgcacaaaaggtgacgggccctgcacctccaaactcggatcagggatggctccagcgggtatgtgctcaaccggcccctggcagcaagcacagggcgccggcacacacaggggcttctggggctcttgggcaggggcctgtgagagctatcaatgtcacctcggcctcgtggtgcccaggctcaggggcagctcactcctggcacgtgacagtgctgggcccagctggaccccagggagggtacaagcccagagctcaggaggtgacctaggaccccacgcaaaccccaccctcaggggcaaagggctgcagctgacaccttgggttctggggctgcttctggtggcctgtggggctggggggcagcgacaggcagggaaaggccgccctgcgctcagcagcacagcaccgtgggggtcagatagaggcgctcccgcctcccagccggggccagctccgggccccctcttcccccagaccggcacaggacccagaccgcccaccccagcacactgacccagacagtctcgcggatcagcctggctatcttgagcaggagctgcccgaatgtgcccggctggaagtgggtggccgagtgctggatgcagaggcacaggaggaaggcgggggtcagcttgtggtcgtcgccccccggctcgatcaacgtcatgatcctctgcagcagcgtgtcctccaggtggggctcaaactccaggagcagctgctggcgccggggcagggcggcctgagtaggggaggcggctccccgggccccgagcgcggccccgcacagccggcagctctgcggcacagcccggaggcgcgccaaggcccgggcgggcaggggctgggcctgcgcggggtccttgaatagcagcaggtagtagagccccagggagagcaggtccccgtggtgcagcaccacggtcctgtgccccacctcggagaagttgacggagatgtgcgccccggggatgggctccaggaccagcctccccgcggcctggccgctgtccgggagcggttgccggcggatggtgcagtgtagaggcaggatgtcgggggctgagaggctgatgctgggcttgctggagggggtccgctggcccaccgtgtgccggtcccggttgagcacatacaccaggctgtcctgaaacagagactccgctcagggcaggcgtaacgcgagcagcacacgggaaaagcgtcccgtgtctagtcactggttgctgaagcagcgtggctgggatgctgtcgccacgggctctccatgtccctggccacccccacaccagaaccccgacggctctcaggaacccgcccctcgatgtccgggcccatcccagaggaggtcggtttcccggaggagcacacgagagacccaggagacacccagctttgagacagcgacaggccaggtcagggctggccgggaaacaggcactggttctacagaccgggccaaggactacataacttcccccaagtcatccccaaaactgtgtgggagcactgccgcctgtgtgggagcaccacccccagtgtgggagcactgccgcctgtgtgagagcactgccccgagggaagatgccacctaaaacctgggcacaggagccctatggctgtaaagtgctcatggaaatgagcagcaaaggagctggctgcacaggagggcgggggtagggtgagcagggggcggggaaaacagttgtctggcagggcaagtgtccggcaaggtgaggcgaggtggccctgcgcctggcatttgctcggggcgacagcctgcctgctctgatggaagtggtgagaaacggctctgggcagataggggtggcatgggcctttgctcggtgccccttcagagaatgtggccaccaattggtgactcagcagccccctcgccagaagcaggaagcagactggccctggccaactgcccatgcccttccccagagccaggcgggagaccaaggctgggaaggcgtgaggagttctccctgaaggcgcctggtgctgagggcacccactctgggattggggaagtgaggagcccccactgccgcccaccgtggcctggacagggaaaatgtggatgactccacatgtgcccccgccatcccactccacagcctcggcacagccagaggggctgcagccacagagctcgcggccgactgggctaaaggcaggcggaggccttgacttctgagtcccgcctgctgtccctgcagtggcaccgggcagtgggtgtcaggaggggaggctcacgtgctgctggctgtagccctgcagaaggagcagatgcggggactggtacagcgagtaccgcatggcgtcggggccgggctcctcggggccctgggcggcagcgggcagggcgttcactgggctcaggctggtctcactgactgtgcggcgcaaccggggtggaggagagctccgggcatcccccagggccggggtcggggttcccttcgcgcgactccgctgcagcctccgggcctgggcgtttatccctggaacagaagcaacacaaggtgaacagttagaagtctcatagcaccaggactgggcgcggtggctcacccctgtaatcccagcactttgggaggccgaggtggggggatcgcctgaggtcaggagctcgagaccagcctggccaacacagtgaaaccccatttctactaaaaatacaaaaatgagttgggcgtggtggtgcgcatctgtaatcccagctactcaggaggctgaggcacgagaatggcttaaacccaggaggcggaggtggcagtgagctgagattgcaccactgcactccagcctgggtgacaagagcgaaactccatcccccgccaaaaaaaacaggtaagtctaatagcgcccatgtcccgggtccttctgagttcaaatcccactaagccacgtctcctaatgccgttactgttctgtcaaaacaggtctggtggagactcaaggactctgccctctagccacgcccctcgaaaaaccagacagtgccttggcaccaccgtggcacccacagaacagtctcagagcaggcagcctgcctgtcaaatcctcaggctgaggggaccacgcctcccctgcagcagcccagggtcacaccgcggcctgcccgaccagccagcaccacggcccacaggcctcaaaccacagacgttttcccacggcagcctgggcctctgcagggtcaccacgccgcctccagagccctgccccatccatctgtgcaccaggcgaaactcccctgggggtggtgctctgacgagacgagacggactggtcagcatcctgcccctactttacaaggaggaggtgtcactgtgccacatcaccccagcccatggggctgccgatggcctgctcctgcaacagcatcgctgcctccttcccaaggctgtctctgatacccccaagccaaagcaggcacacacacaaacacacgtgtgcatacacatgcccacaaatacacatgcacccacacaaaaatgcacacacacatgcacacacatgcacccaaaaacacacatgcacacacatacacacacgccaacacacatgcacccacacacattaacacatacatgcacacaaacatgcgcacagttcagagataacacacacccttagaagacttaatatctcataaatacagacacgctctctaaatgcatgctctgggaaagccagccggctgcgatagatgaaaaccgctcaccagtccccagctgacccggcgctgtcttttctgagccctctgctgagttccctgtacgcagcctttcaggttaagatccatccccatctgtggcggcctttcctccaaccattcccaataaaaccaaacaaaagccggatggagggaggcgtcagctggctgaggaagacccttaccagcgccagcagccccgccgtccttcccaaggcagccggcagcctgtgcatctgcagcccgcagggggccagggcgtgagggaggccgcccagccgcagtgcgaggctgctgggctgggctgctcaccacccgtgctcctgccgcctgcagaacccggcccagcctggcaggcggcaggtgcccagcaggtggggcccagttcccctacctcatcccacccgccactcccacaagcgttaccagccccacagctcagcctcattgcacaactatggggccagatccgaaagaagaacaaaaacagctccaaatgatgctccggccctcaactttctcccaaatccagggccaggttgtaggaggtgacctcagagtgacctgctggaagtcccagggccatggggcaggaagggttgcttctcctcctagagtcccaggggctcccagaggacctggccacaaatgcggcacgggatgtcccaggcctgtgtcccctggggctgcagccccaggcaagtggctcgcagctgagtgtaccctgctcctccaggcaaggctccacagcctcctgaggcccagggctgggctctctgcaggtcggaaccaatgctgacacgcaggggccactcccagggtctccttcctggtgctgggtaggcctgcatgtgtgcagaagggccaggctgccagcctccaacgaggggccggaggtgaggcctctcctctgggcggtggggctgtccctgcacccaaggccacaagcatgacagagcctccctctgagtgcaggtgtgggggaggtgaagcagcagcagccactgccaatactggcacagccgtgggcatggccagtgtggacagcaactgaccacgccactctgctcctcagtcccctgctgtggaacagccagcaggacccgtgcactcgtgcacacatgcatgcacacgtgcacacgtgcacacgtacattcagcaccgcttgagttagcaaagcccagaacccacccaatcaccccccacagggagccgccatgcacgggaggagagctctgcagagagaagaccgtagccagctgtgtacgtgaccacagggtgaaagagcaagctacaggtaacacgtgacgtgatgtaacacatgatatgacgcgttggctcagttttttttaaaagcacctaaaacaccgctgtatatagcttacggtttctatatatgtgcatgcaaagctattttttaccccaaagtcattcaggagtaggttgtttaatttccatgtaattgtatggttttgagcaatcttcttagtactgatttctaattttattgggctggggtcggagagtgtgcttggtataatttccgttttttttaattcgctgagaattcaaacaaatgtgttttatggccaagcgtgtggtcagtgtagagctattttataaaagagcaatgcacacagtgcgtttaccacatggcggctgtcctcaacaggtggcaggggaagcctaggcatggtggaaaaaatgacttcaatttcataggatttagtatagtgccagtatgtaacagaatatatgttatatataatttatgataaatatattatcataactttatatcatgtttgacttatttcatttttttaaactctaaacaaatatgataaaaatctttacctgtcaaatctgggaggggaacccaggtgtcagataaatgtaactgatgatactttatttttaaaagctttcctgttggtttgttttgggacagagtctcactctgtcgcccaggctagagtagcagtagcaaaatcttggctcactagaacctctgcctcctgggttcgagtgattttcctgcctcagcctcccaagtaactgagattacaggcacgtgccaccatgctgggctaatttttttatctttagattagagacagggtttcaccgtcttggacaggctggtctcgaactcctgacctcaagtgatccgcccacctcggcctcccaaagtgttggaattacaggcgtgagccaccgcgcccagcataaacacttttgttaaaataaaaatcacagaagtttgaaaggcctcttgctcacgtgtggctttgtgacttggccctgtcccaagatgaggctgcggcagatgggacccagcactctgctcccagggggtcggctgtcaggcttgttgggggccgacatggcctcccaagttcccatagagagagctgcaatcgtgccctgtttgtgcctgacctgatacagcttcgtcacctgagtcacctgagcgtctcagctctgtgcagacccagggcggatctgcctcaactgggacagaaagtgcccccacttggcctttgggtggagggagacaggagccgaggcacgtggagagcatccctcgtgatgctgaccccagccaccttcagaagcatcgcatggcgccatcgctagacacacagcgtggagttgtcaaggccctcagacccggcagcacactgctcaggaagggtaggccagggctttgcaattttagggactgcctgatttgggggtcttatataggtgtgctctttgccaagaacagggtcaccccaggggcccttatgctaccaatgggagattccgccaacatgaaataagttcagtgagaaatacatcatcaagaaaccactatttctggccgggcgcggtggctcacgcctgtaatcccagcactttgggaggccgaggcaggtggatcacgaggtcaagaaatcaagaccatcctggccaacatggtgaaaccccgtctgtactaaaaatacaaaacttagctgggcgtggaggtgggcgcctgtagtcccggctactcgagaggctgaggcaggagaatggcttgaacccaggaggtggaggttgcagtgacctgagatcgcaccactgcactccagcctgggtgacagagcgagactccgtctcaaaacaaaacaaaacaacaacaacgaaaagaaaccactatttcaaaacaaatgaattctaataaagcaaaatggcaggacggccgcagcctttcataacagtaattttagatgggaagttattcatcttaaataaagcgccagaccctgctgtgggtgaaggagacacctccaggctgcaagccagaatacgcccatgtcttctgttgcctaccccatgtgagggacaagacaggccgaggtcagctgtggccccaacgccctcgtcttcttcaaggacccctgggaatgttcctgccctggcgtgactgagttcactgggatcagaggtgctgcgtaggtttaagggatgcccagaaatctgtattggtaaatgccatctggaagtttctagaacagcagccagggaggggagccactgccagggcactccccctcccccaaagccctgtccacagcggttccttacagggagcaaagtgacacccacaagcgctgggagagcttggtgggagcatccagtttgatctagtgttgatttcagtccttctcaggataagtgtctgtcagttcctgcagaggaagccggcgggcgcgggtctcccctactgccccgtgttgatccactctagtggagaggcagaaaagcaacccagcccaggaataaggcggggtctgggtaactgggaccttggtgggcagccctgcttcaccccagcaaccctcaggaaactgcctggctccaaacatctgctaatacatggggtcccagcctcagaagcaaaatgtacactttctgacattttaagaagagaacacaaggccaggcccagtggctcacgcctgtaatcccagcactttgggaggccgaggcgggaggatggcttgggttcaagccgaggctgatcaacatcgccaagtctctacaaaaaatacaaaaattagctgggtgtggtggtgtgtgcctgcagtcccagctacttgggaggctgaaggggagaatcaccagagcccaggaggtcgaggctgcagtgagctacgatcacgccaccgcactccagcctgggcaacagagcaagaccctgtctccaaaaaaaaaaaaagatgcaacaaggccagaggctggaatagcagcgtaggcctcgtaagggaccatggtttgcagacaggcctgcctggtcatgaaatgtctgcctttgacaatgggatagaaggagtagaaagtgcagggcgccggggcaatggggaagatggggatgggacggtcgttgttgacatcttcttctactctcacagcagaggccgtaaggaaaggagggctgagctccatgtccctgaagctctgttagcggccttcctccccagcctgggccaagccgagctgctgagcacatcctcatctccaaggtgagaaactcactcctggaggaagcggcgagggagacagcatgcagccacagccacacggctttgtctaggccacccccctcccctcctcgagaaggcagtgcctagtgacccgctgctggcagagagggcagggctctgcgtgccgggggtgcacagggaaactggacaagcagctggtgaccgtcaccagctcccacggactctgaacagccctggaaagaaaaacacaggctcttcctgaacgttgctcaattcctctataaactcagccggcagctttcgcctcctgatcctgttttctcttccctccctggctcttgatggtttggaataatgatatatacaacttggaaccgtttctgtcacccatccccactcgcaggcctcagagatgaagtgactaggagtggagacggaggggataatgaaacgttcctgggctggggaactttaccactactggggaaccggagaccattgtacttatttgctatgttgcccaggctggagtgcagtgtggattcacaggcgtggtcaccataataccctgcagcctcgaaattctggcctcagggcctcagaatagctgggactataggtgcgcacccccatgcccggcaagagacaatttttttttttttttttttttgagaaggagtcttgctctgtcactcaggctggagtgcagtggtgccatttcagctcactgcaacctctgcctcccgggttcaagtgattcttgtgcctcagtctcccgagtagctaggattacagaagcccactacccccgacccccgccagctaattttttgtatttttagtagagatggggtttcgccatgttggccaggatggtctcgatctcctgacctcgtgatccgcctgcctcggcctgccaaagtgctgggattataggtgtgagccaccgcgcccggccaagagatgattttaaagtggcccctagtaacaaccggggacgcgctgctcaataaactctgcagttactgctgcaaaacacagaggtcagatgggcctgaaacgagtcttctgttagctgaggcacccttttctaagctagcaaaggacacagagccgtaggaccatcaagcagtccttgaaagaaaatcatttcaaatgtacaaaaaagaacttctcaggcatcatttggtaagcatttctctatgccatggccagcctgactctgggcattttgcatctaattccattttattctcattatagaaaccctacaaaggctgggtgcggtggctcatgcctgtaatcccagccctttgggaggctgaggcaggtggatcacctgaggtcaggagttcaagagcagcctggacaacatggggaaaccccgtctctaccaaaaatacaaaaattagccaggcatggtggtgggtacctgtaatcccagctactcgggaggctgagacaagagaattgcttgaacccataaggcggaggttgcagtgagccgaaatcacgccactgcactccagcctgggtgacagagcgagactccatttcaaaaaaaaaaaaaaaaaaaaagccttacgaaggaactgtggctaaacaggaacatattagcctcattttgggaaccaattctgccatgagggaaacaattctagggagaatatatacgtaacttcctcttgccatcaggaacaagacaaggatgcctgctgtaaccacttctcttcaaatttgtactaggtcctagccagtacaacaggcagggaaaaataggggaaagatacaggattgaaaacaaagaagttgccaggcgcagtggccaacacctgtaatcccagcactttggaggccgaggcaggcagatcacgaagtcaagagatcgagaccatcctggccaacatggtaaaaccctgtctctactaaaaatacaaaaaattagctgagtgtggtggcacgcgcctgtagtcccagctactcgggaggctgaggcaggagaattgcttgaacccgagaggcagaggttgcagtgagctgagatcgcaccactgcactccagcctggcaacagagtgagactccatctaaaaaaaacaagaaaagaaaagaaagaagttcaattatcattattttgcagacaatgtgattgtgtatgtaggaaatgcaaaagaatctatggaaaaattattataattaacaagtgaatttagcaaggtgactagacatggtgaataagcaaaattcaggctgttttgttttgtttttgagagagggtcttgctctgtcacccaggctggagtgcaatggcacgatcacagctcactgcagcctccacctaactgggctcaagcaatccttctgcctcagcctcccaagtagctgggactacatgtgcacaccaccacgcccagctaattttgtattttttatagagacagggtctcactattctgcccaggctggccgcaaactcctgtgctcaggcaatcctcccgcctcagtctcccaaagtgctgggattacaggtatgagccactgcacctggccagtaatatatttaaagatcagaagcaaatcatgttggattcatgacccaggagtcaaccacatgtggcccctgagtgctaggactgaggaaagggaccgaattaagaaacgaggggtgttagaatttgacctacgtaggaaaaaaaaaaggaagaaagaagcgagaggtgtcctgtatatgaaaattatatttacagaatactttagaaacctaacctaaagaaagctaatgtaggctgggcatggtggttcatgcctgtaatcccagcactttgggaggctgaggcgggaggatcacttgaagccaggagtttgggagcagactaggcaacacagcaagaccccaaatccacaaaaataaaaagatgaaccagatgtggtgggacacgtcttagtcccagctactcaggaggtggaagcaggagtaccacttgaacccaggagatggaggctgcagtgagctatgattgtgccactgggctccagcctgggtgacagagcaagacctcatctctaataaatgaagtcagaaaatgaaggcatattctgagaaaacaccagaatcccatctctaatcgatcaataaatgaagtaaatgaatgcatacactaagaaaacaccagaatgaaaagcaccaaagcgttgaaaatgattctctccgggaggtgacctgacaggtgatttctcctcctttctctatactttcacttactttccaaattttcggcaaaatgagaggttccatttttttagacggggaagaaattatttttttacatactctagggtattatttccatgatgaaacttggaccgcctcacactaattagagtcttactcagggaacaacaatcgcgctctctgaaaagcaactgaaaacctaattaagataatgggtaactgaggagataaaatgcttaagccatttgttaggcagacacagatggagacagagctctccggggctgtgccgaggagagagcagcgtggcgtaaccgagaacttcctccagccgaaaccaggggctgtagccagttaccccgggaagctgtgagcccttcgttagagagggtcacggtgaccagcgaagcacagtcctgctcaccgcgtccagcatggcgctgggcacgccaccaacagcgacagccctatggagggcgctgtttcatctcaggcaccactgcttatttgtctcttttgttccagagctacaatcttcttttttttttttttttttttttaaagagacggagtctcgctctgtcaccaggctggagtgcagtggtgcgatcttggctcactgcaacctccgactcactgcaacctccgactccctggttcaagcgattctcctgcctcagcctcctgagtagctggaattacgggtgcctgcctccatgcccagctaatttttatatttttaggagagacggggtttcaccatgttgtccagtgtggtctcgatctcctgacctcgtgagccacccgcctcagcctcccaaagtgctgggattacaggcgtgagccaccgcgcccggccctattgcttttttaagtatcttgagttttaactttggtgggggagtctttccttgccatctagaaaatgattccaactcccttccctcccctgcatctgtctttttttttttttttttgagacgaagtcttgctcttgttgcccaggctggagtgcagtggtgctgtctcagctcactgcaacgtccgccttccaggttcaagcgattctcctgcctcagcctcccaagtagctgggattacaggtgtgtgccaccatgcctggctaattttcgtatttttagtagagatggggtttcaccatgttggccaggctggcctcaaaactcctgacctcaggtgatccacccacctcagcctcccgaactgctgggattataggcatgagccaccgtgcccagccacaaccacattttttaatggacaaggatttgaataaacatttcttcaaagaataaatatacatggccaataagtacagtaaaatacaataaaaaatgctcaacatcattagtcatttgggaaatgcagaggaaaaccaaaataagataccacttcacacccactaccatggttataataaaaaaggtaaacaggccaggcatggtggcttacacctgtaatcccagcactttgggaggccaaggtgggtggatcacttgaggtcaggagttcaagaccagcctgtccaagatggtaaaaccccgtctctactaaagatacaaaaattccctgggtgtggtagcaagtgcctgtaatcccagctgctcatgaggctgaggcaggagaatcgcttgaacccaggaggcagaggttgtagtgagccaagatgacgccaatgcactgcaactgggcaacagagcaagactccgtctcaccaaacaacaacaacaaaaaagttaaacaatatcaagagtgcagaaagactggacccctcatacacgattgctggaaagtaagatggtgcagccattgtggagaacagcttgtcggtttgttaaaatgttacacatgaatttacctgtgactcataagttcaactcctaggtatatgcccaagagaagtaaaaaatacacgtccacgcaaatgcttatgcacaaatgttcacagcagcattatccagaatagtcaacaagggagaaataatccaaatgtccatcaacgggtgaacagatgaacaaaatctatccatacgataggctactgtttagcaatgaaaaggaacaaaatactgatgatacctcttacaacatggatgagcctcaaaaatatgctacgtgaaaaaagctagatgcaaaaaaaaaaaaaaaaaaaaaaaaaaacacacaggtatgactctatatatacgaaatatctggaaaaagcaaatgtatagagccagaaaactgatcaggggctgcctgggtctgggggtgggaccggctgactgctaatagacacaaaggatcttttggtgatgaaaacgtgccggccgggtgcagtggctctcgcctgtaatcccagcacttagggaggccgcagcaggcggatcgcttgagctcaggagttcgagaccagcctgggtgacatggtgaaaccctgtctctaccaaaaatacaaaaattagtcaggcatggtggcacacatctgtagtcccagctaactcgggaggctgaatcgggaggactgcttgaacctgggagatggtggaggttgcagtgagctgagatcacaccactgcactccagcctgggtgactgcacagactgggtgactgagtgagaccccgtctcaaaaaaaaaaaaaaattgctaagactggactgtgatgatgatgatcacacaactttgtaaatttactaaaaattcattcaattgtatactaaaaacaggtaattttatggtataaaaatacctcttataataaaagttttttaaaaaaaaaacccagcaaagacatttctttacgtcataagcccccagtccaacagagacaaggaagatagctccaagaagctgaaattgataagatatcgaatatatctgaacatcttaaaagagggaagacaacagagtgttaagggaatgcggaaataatgaaaagtagcaaggaaaagaatggacaagcaagaaggacaataattaactacaaagaaaaataaaagttggacaggaaggaaaaacaatatttgtatagacccatctttagttgtgaaaagctatacatgatcataaaaaggtaaaccctgattattaatttaaaaaaaaacatggctctattgagaagatcgggcaataggaattggaaatttggagaggcgggtggtgaaaagacctaagttctcattttccactgaaggaagtcactagaaaatgtctgaaatttttaaaaaccaagacatagtaggatacgtttgttaaagatagggaattaggccgggcatggtggctcacacctgtaatcccagcactttgggaggccgaggcgggcagatcacctgaggtcaggagtttgagactagcctgaccaacatggagaaacctcatctctaatgaaaatacaaaattagccgggcgtggtggcatatgcctgtaatcccagctactcgagagactgaagcaggagaatcgtttgaacctgggaggcagaggttgtggtgagccgagatcgtgccattgcactccagcctgggcaacaagagggaaattctgtctcaaaaaaaaaaaaaaaaagggaattaaaagccagaaagaaagagttcacagttgaaagtggttatggggagttcaaaactgggaagaaggaacggctatggcagagaactgctgttttgcttttaatcggtaatgagaaactattgctttaactgtgcacatatatatataactttggtgaaaataagtaaaaatatttaagtgtacatagttttcattctactgcaagaatgaattaatgaatgaatgaacgttgatgggatcaattccatcaactcctaaacacacttgtttatcttctaacatctctggaactggaaggcatcctgtattctgtggaatgtcggccaggctgcagctgtgaggctacagcttggtttttgttgcctggggcaaggttctgaaacatttcagttcattcaggaccatccaaggcatgaacatgccttccagctgttatctgcaacaaacctgcagaccgaatggcaggtggcttggaagaatgtactagagacagcagggggtgccacatcaccaatcctcttgaggacaaagaaaatgatactgtgtggggagtgtggacagggacggctctcatttgaaaagacttagaatcttaattcatttcactcctgcatacctttctgcgtacgcacaaaacgaacacagatcacaatctgtgttgaaataaatctttagctacaatacagcttaagtacaaaaataaaaatcctaggtaataagaaagtattatgtcctagtttaattgtattttttatggtggttaacactggtgatcttactactgataacatcttttcttggtgaaatatagtatatgtaggaatgtatgttgcaaaattgttcctaacaatccccaaatacatagagtgtttcgtctacaccaaggaatattccataaccattaagatgaatgaattggaggtataacacacgatgtattttccagagaggatctggtatgaaaaatacagaaaactaagtatatgattccctcattgttttctttttatttttttcttcattccttttacccacactacacagacgatccctttaaaaaaaaaaaaaaaaaaaaaacctttgacagaaagaaccctgtatgtatgtatatacatgtgtaagaagtcccctgcagaataatataagcacagaaaaagcatggaaggtcactatggtgggcagaattctaagatggctccatggtctctgccccctgggctcactctgtgattatgctgcatggcagaagagattctgcagatataattaaggttgtctatcagctgaccttgagatatggaggttatttgctgggccgaacctaattacgtgtgctccttcaaagcccagagttctctccagctggtcacggaagagaagtcagagaggtttgaggtgtgagacgtgtgtgatgccagggcagctctccagggcatcacggggcaacctgacaacagtcactgggagctgagagtggtccacggctgtgagccagagagagacaaggggagagatgcagagacttcagtcctaaaaccacaaggaattgaactctgccaacaaccttgtgagtctgaaagaggcccctgagctccagaaaggaacgcagcccagccgataccttgagtgcagccgtgtgagacctgggcagagggtccagctctcccgtgcccagactcctgacttgtggaaaacgtaagttaaatagtatagttttaagctgcacttgtagttgcaagcaatagaaaacaagttcagggccgagtgtggtggctcacacctggaatcccagcactttgggaggccaaggcaggtggatcatccgaggtcaggagttcaagaccagccttgccaacatggtgaaaccccatctctactaaaaatgcaagaaaaagtagccgggcatggtggcacacacccgtaatcccagctacttaggaggctgaggcaggagaatcacttgaatgtgggaggtggaagttgcagtgagccgagctcatgccattgcctgggtgacaagagcaaaactccgtctcaaaaaaaaaaaagaaaaaaagaaaagaaaagaaaagttcggattttagggccaggaaatggggtgctactgtaacaaatacctaaaatgtgaaggtgctttggtaaccaggcaataggtggaggctagaaggactctgagaagcaggatggggaaagtctagattcccttgaacaggctactaggaaatgtgcacagtaaagacattgcttctttctcagaataaagtgagaactttcctaaatcacctcagagaaaggcaaaattgctgcaaacagcagaaacctagatggctcacaagactgccagcgaaggctcagaaggaagcgaggggcatgttactggaaactggaggaaggagggttcttgtgatgtgagggcagggagctcactgaatatgtcatcctgcaattgctggaaacagaatttgcaaatggtgaacctgaagagatggctgaggaggtttccaagcagagtgtagaaggtgctgcctggtttcttcttgctgcttatggttaagaggcaacaggagagagagaaattaaagaactgttcagcaaaaaaagaaccaggactggacaagtttgaaaatgcgcagccttcccagatgacaagagatgccaaaagtcagaaatggcttctgatgagaggcacagaggaaaaaccaagtgtgggtctggacaaccctttgctgaaacccaggaagaccaaaaggtcagggtacctggccacataaatgactcagtagagtcagggtgttcctcatatatttttcttagtcaaaacagaggacctcaaggaagttcaagagcactgtccctccaccatctcaccagaagctgaaagtagagaagggattatctcagagacatttatggatgtggcttctgtctactggagtgaattctcaggaaatcctcatccggcccacaggctcttcagaaaattataccagcagaaacactggctggcctagactgaagggaacagagacactgaaaaatgaagggggtggctacagacaggaagtggctgatagacatgctaccgtccatgcagagggaaagatgactcagaggatgaagccaagatcccagagggtggcaccaagaggacagagggcagagctgagagactaccccaggccttggaacggaacaaaagaacttccactggaatttgcctcactagagttcaaaaatgctttgggccaggccagtggcacctttttaccttccgtttcctcctattatttatttatgtatttattgagacagggtctagctctgttgcccaggctggagtgcagtggcatgttcaaagctcactgcaacctcagactcctaggttcaagcaatcctcccatctaagcctcctgagtagctgggaacacaggtgtgtgacaccatgcctgactaattttttattttttgtagagatgggggtcttgctatgttgcccacatagcacagagtggctgggattacaggcatgtgccaccacaccctgataatttttgtgtttttggtagagatggggtttcaccatattggccaggctggtctcaaactcctgacctcatgtgatccacctgcctcggcctcccaaagtgctgggattacaggcgtgagccaccgcgcctggcccatttccctcacttttgaaccagagtgattgttaccctatgcctgtcccacccttgcaagttgggagggctggggcagatatttgtgtctttagtgttacaggtccacagatggaaagaaatagcgccccaagagtggtacttaatggattatacccagacgccccattcacacctgatttagattaagatgatgagattttagacttgaagtgatactataagaggatgagactgggggaccttgagatggggtgagtgtattttgcatgtgggtgtagctatggatcactggaggccagagggcaggctgtggcagccagaattctaagatgacccccagtgacccctgctttgcataacccgccctccaaccttgagcgtgagtgggaactgttcgtgtcatttcaagattatgttttgttgtatgacaaaagagatatttgcagatatgtaaataagttttctcatcagttcactttgggttaatcaaaagggagattatccaggtgggcctcacctaaacacatgggccttttaaatagcagaaaggaagtcaaatactcaaagaatgatggagattccatgtgccactgctgactttaagatgctgggggtaggccgggcatgttggctcacacccgtaatcccagcactttgggaggccagggcgggcagatgacctgaggtcaggagtttgagaccagcctgaccaacatggagaaaccccgtctctactaaaaatacaaaattagccaggcatagtggtgggtgcctgtaatcccagctacttgggaggctgaggcaggagaatcgcttgaacctgggaggcagaggttgtggtgagccgagatcacgccactgcactccagcctgggcaacaacagtgaaactctgtctcaaaaaaaaaaaaaaaaaaatacgctgggtgtacatggaaagttatttggaagtgattttgaacttctaaatatatgtgtgttgtgaaagagaagactatcattgccatttactagacattctctccttcctcttaatagcataagccctaagctattggtgaggtgatgtacccagctaagaaaagagacattttcctgtctcccttgcaggtaggcacagccatgtgactacggtgcagtcagtgaaagatgaggggatgccgctgttgggacttctccgaaagctccataggtgggcagtttgcaggtacacctttgccattccccgtcttccttctttcttcctgccttaaatgaagatgtgatggcaggggccccattaaccatcctgcaccttgaggtaaccctgaagatagaaggcatgaactagaatgatggggccgaaagtagaaaaagcctggtccctggtgaccaggaaagccaccgttaccagccccgaacttactgttaggtgaaagaaagctgtattgtgcccaagctactctgacctggccaaatgcaattccaaactgatgagggggcattaggtggggttttctgtttgcttttgtttctggggagggtggtgtttggtttttgtcattgttgataaagaggttaccactttgggccgggcgcggtggctcacgcctgtaatcccagcacgttgggaggccgaggcaggcagatcacctgaggtcaggagttcaagaccagcctggccaatatggtgaaatcctgtctctactaaaaatacaaaaattagctgggtatgttggcgggcgcctgtaatcccagctactcggaagactgagacaggagaattacttgaacccgggaggcaaaggttgcagtgagccgagatggcgccaccgcactccaccctgggcgacagagcgagactccgtatcaaaacaaacaaacaaacaaaaacaaaaagataccactttggtattggttgtttaattatatttcacacatatgaaagcatttgtaacttagactaataacaaaataaacaccatttcatccaccacccaacctaaaaagaatgcactagttccagagtcacatcaaccctcccaagcacatcttcctgcctgtccccacctctcaccccaccaaagggaatcactttcctggattccgtgtttaacatggccttttttcatttatagttacaccacacatttttggaaccctaaattacactgctctactttgcttattttgaaaccttatgtaaatggtatcacactgtgtgcatttttgtgcttttccctcaacatgatgacacacagctaacactgacgcaggcagctacggtctaatttcacaactttatggtatttattgcatgaatatgccaccatccagccattccctcattgatggatatgtggattgtttggaactttcggctactacaaaacgttgacataaacactctcatactcattttcaaatgcttcctgacttttctaccaccacgagaaataccagagaaaattatggtagttaaatggcacactggaggtaaactagaaggtgtgtagagttctggacacggctgtggtcccacagactctggtcaccccaaagactaaggggatcagtaagatgaagtacatcagtgtcccacagcatgagggtgaagacctacgaggagactaattggaacgcagagtgtgggcccgtcaactgtgctagataagaccaagctgcttcccaaaggggccaaaacaatttgcaccatgttctcactggcaccgcgttcgagtttccgttgctcctcatcctcaccatacctagacactgttagacttttttatttttgtaaaaaaaaaaaaaaaaaaaaaaaaaaagaaatgcctctctggtctcatattgtattttccttgttactactgagattgggcatcttttcatgtttattggccgttcctagctcctcttccgtgaagtgcttatgcgcttctttggcccattttttaaactgggttgttggggattttattgttttcgatttttgagacagagtcttgctctgtcgctcaggttggagtgcagtggcctgatctcagctcactgacacctccgtctcctgggttcaagtgattctcatgcctcagcttcccaagcagctaggattacaggtgcgcatcaccatgcccagcgaatttttgtatttttagtagagaaaaatacaaaaggtggagtttcaccacattggccaggctggaatcaaactcctggcctcaagtgatccgctcgcctcggcctcccaaaatgcttggcttacaagcatgaaccactgaatccagctttttttttttagacagactctcaccgtcacccaggctggagcgcagtggcttgatctcagctcactgcaaccttcacctcctgggttcaagcgattctcctgcatcggcctcctgggactgacaggtacatgctgggactacaggtacatgccaccacacccagctaatttttgtatttttagtagagatgggtttttgccatgttgcccaggctgatctcgaactcctggtctcaagcgatccacccgcctcgacctcccaaagtgctgggattacaggcatgagctaccgcacccggcctgttgatctttaaaacagactttttcctttgtcacccttaatatattctggatagtaatcatttgtcagttttatcttatcacaaaatcttctcccagcttagggcctgtttttcagttttttacttttcacggttcattatctgatgaacaaaatctcttaattgtaccaatctcttctttcatgacttgagcttttttgtgtcttctttatgctgttacttaatttctaacttactgttctgtggtgagagaacatgtcctataaatcagatactttgaagtatgttaaatattacttttgatatagcaagaggttaatttttgtacatgcccaatgcttatttgagaataacatgcattttccaattgtggggtggaaggttctataataaacattcaccagatcattcatggcaaacaatggctgatagggatgggtgagaaatccggccctggccatctgtttacatattgtctatgactgattgccctctacaaaggcagagttaagtagctgtgacagagaccggatggcttcacaaagctgaaaatatttactatctggtccttaatgcgaaaagtccaccagccactacaccggactgtgttcaaaaactgtttcccttctatttttatctgcttgatatcaattaatgaaaggctgttttgaaatcttctatgataatgacacatttaacaatttctgttcatctttgttattttatgttgaggctgagttattaggtgcagacaagttttaaatcattaaatgttcctgatgctgtaggacttctatcattaatgcatggtgctcttgcccttaataattatttttgctctgacacctacttgaataatgttgttattatcccagcttcttttcattagcgtgccttttttccattcttttattttggttgtgtctcttttaagtaaaacagcatacagttggacttggttttcccgtggaatctgaccatctctgccttttttaatcaggaagtttggtccatttattgtagtgacagttatacttggtttcatttccatgaccatagatcgtgttttctttttactctatttttttgtatgctttccccctttctttcctgccttcttctggattcagcttaacttcattttttacttttacttacttgaaattttaaccttttcatgtttccctaaacattactacgttctagacttagtaagatcgaaaggttcatcagtgactctaccctccttcagaacaatgtaagtacatctgaattcatatcttagatttaaatcgtactattgtccagtattttagtttcactttgcttgtttgccatttatttttattgcatttttaatggagaaataagtcatctgttttcaaaacagtgcttgaatataccaggagtacagataccataaaacaaagcaaactccactcactaggtacatcacatgaaaaaatggtctgacattcaggtaataaaaattagaaataaaaagtcccaaggttccagcttggtaaaacagacacagttacaggtaatgtttaataaactaatttttttcccaatgtgtaaacaaaatgaccagactaaatttgtgcctggccatttcaacctaacgccatagccattcaaaatacagatattgtgcacacttcacccgatttattattgtggtgaaacggcaaagatgtgagaaaaagaaatactgtgtactagatatcagaaagtaatggtgaaagaaaagtctctacagcataaaaggacatgactatattccaactttggaaaattaatgcaggacaggaaaagagtttaagtaattgcagtttaacatgaaaagtgcagagttagaggagggacgggaggggttaaagcaaggctaattggaaagcctgttaagtttgctgtctagattaagaaagactcaactttcattcattcacatctgttgcccctcacatttcctaatcatagatgctctactgcttaattatgagattttttttaacttaaagtattgctgatcttttgtagactaaaagagcagaaagccagtaagatgtcaagtgcttgctagaaattacttttttatgtttctacatgtaaaatttagagatgaattttgataaatcgtttaaaaataaaagtgtttaaaattcttgaagaaaatgcctttttgcttatgtgtgcaattggaaattaactttcctataaggaggtattctgtggaatgaacaaaacttctcatatgcagtgatcaaatggtcatccaagatcagaaacatatctcatagacattacatttagtaaagttttgctaaaatgtggtgtttcatcataaccaatatttggtgttttgtgccatgtggccacaggattgtcagtttcacatcatggtttagagaatattattccttttttcttgtgaaatgacacataagcatactgtgtgcatacaggcaaagagaagagagggaggcaaaaagcttttttgttttaggactaatgattgaggacaagagaatatggagctttgatagctcaaagaaaatgtttgattgctaattactctaaaacagttctacagattaaaaccagtgtgtcctttctccatagtgtgccatcaaaaccaaagacctactaatggttgatgtcaaaaacataccttaaagttgacatttcattttaaagggttacagctacctcatagggactgagctagatgtacttttatgctttctctgaagtacagtacaccgctgcacaatggtatccaattttaagattaatagtgaagaaacctcttcagggaaaaataaaattcaccaatttgaaaaatctaaaattagttctactttctaataaaaaatataaagtgcctcatcagtataaggaattctgataccagtttgtattgcatattttcccaacaatgcatcaagcataaatccagtccagatgtcagtcacgggtacaaacatagctgaaaggttttttcattttaagggcagtagtcctttgaaatagttaatgtaactgttgctgatacattaataacagtacctctagctgtcacatactaatgtggacttctgatcaagactggctcagtaaaggaagttaccaaatgagcctcaatctatttcaagtcatatctagtcccgtacccctcattctccttccttagtatttgaagacaacaggttcagttggcagatattgttcatggacccttgaggttgtttttaaccattcaacctgttttactgaattcttgataacaggaattggatttgcagggagaacagggataccggaaagatctatactgatgttccctgagaggccaatagagaagatgctgtctgaatttttctaatggagttgtacttgtctttgtattgagtttctcctcttccgttttggttttcttggtcctttcttctttatgaggcaagaatatcctctagactccaactataggattagatatgtttgttgctgagtttcctgaaggtctggatggcttatgagacatgttgaagaaacaactctggcgaccatggcctttggtgatggagaaatggcaggctgagagacagcgtgaggaatactttcgtttaatgcaacccctgaactttcattggtattcacctgttgcaaggaaaattcagtagcctgtatgttagccacagatgctgtcattacagccaaggcaggactgtttctaccctgagaactgctaatcaatgggcctgtcttcatagtgctagtagatgaaggcacagacatgctgttttcacagcctgcagacaagtcaaagctgctgtcgttcaaatctgtcaatcttctaccttctgttgagtgtgctttcttgtcctgaagcacatgatgaggcagcagctggtgaagttcctttcttcttaaatgcattgcagtaattttcatacccatctcaaacatcttactattcactgcttgcctataaacagtatctgtgaaagactggatatcataggtgagatcaatgctgagaatttcagaattatctggcttttttagccctaacccaatcacccacattgtacgaaattcttccatatcaggattttctttgggtgctggaaatgactgtggattcacatgtgccagtgtaataaattcattcttctccaagctcccaaccaggattcggatctttgattccaccaagcccacccattctaaatgttgtttttctgttgatgcacttgccagaagtacaatataatgcttgtacttttgaaagaagcttggagcttcaaagagtttggaccactctgccttacttagcaaaatctcgtgtgtgatagcaagcccctgtttaaactcctcaatcatgaccatcctggttgaaatagacacgttgtatgtggagttctgctgtgggtatgctggtgtgatgataggcataagatggtacctatcactgggatttactcttgggtcccatacaggcaaattaagattccgttcttcaggctccttcagtaacactgggtttggccattcccattctgaaaataccaagaagaatttccgtacaagagttgacgctactgcatttggataaagctgacaagttcttgctactagcatggcccaggaaacacctccgaggaaacctaatatattggaatagatattgtggcacttggcccacagtttgatggctctcagagtcagcctgaagttgtcaatgtttggcactagatgtaaaatttcatcggttacccggcaaccattaaggcttcttatgcatctaatgtctaaatttttaagtagactgtcatctcttaagtccaaatcttctggaatagtctgtagtgctaatcttgcaaataaaatatcaatctctatcccatcaaaacacagtttgataactggcacaaatgcctcctcgacagcccttaaatctttcacttcctcctgtagtttcagtttagcatagaatgaggtgaaaaagtcgcttcgatccacatgacttggtgcaacgcacaaggcgtcaatatctgcgcctttcgtatgtactcctaatctgtaagagccaaacgtaaaaatctttcctccaacgttttcaattacagactggggaagactcttgctttcactgatttcgcgtatccattcctttaccagattatttaatttttccaaaactaaaatcctgcgctgcagttcctcttcctcttcgaagaccccgaagggcctgagggtttctattagcctctgggtgaggaggcagtccgtctccttggggaccgctagactgataggcgaggagacgccgtagcgattcggcggcggcgccggctgcggtggtccctgggttgtcaccggaaacggcatcatctttcagcgcccgccccgccagggcacgtcccccaccaccgcgaccttcgcggccgccgcccgggtcatgatccgctgaggcggaagggcagggcttctagctgccctggtccgaccccactcccactcccgctgcgcgcccgccgcttcaggagcttctcctccttcccctcagccccaacatggcgccagacccctcagcggctgcgttccagaacctaccgtacacgcgcgggcgcctgcgcacccgccgccagcgcgagggctcacgggagccacagcgttctgggctggggctcctaccgctgcgcggggggctatacatgggggtgggcaggattcacgttgttgatgaccggccaaactcaaccctttattgccactattttacatatttgcccaactttacccatctaattctttgctctccaagtcccttgacatcgcagatgtgcatcctttttgggggcaccctcagcactcttcaccctagcgtgcaccctttggaagtccaaagaccccttcgtggtgggaacccgcggtggaaagcagcttctgtcttgtttcttgggccgttgctggacattggtttagctggggcagcatttcgaggtcgacatttgtgttctggccatgctttaagggcgcgatactgctgtcctctggttcccgttgagaattccgcagctaggtgaactactgctcgtctgtcttttcttatggcagctataaaagtgtctgtccctagtgccctgtgatcccaccactgtgtgtccaggcatagatttctctttaataatcttacccaggctgggcgcagtggctcacgcctgtaatcccagcactatgggaggccgaggcgggcagatcacctgaggtcaggagttggagaccagcctcaacatggagaaaccccgtcactactaaaaatacaaaattagccgggcgtggtggtgcatgcctgtaatcccagctactcgggaggctgaggcaggagaattgcttgaacctgagaggcagaggttgcggtgagccaagatcacaccattgcactccagcctgggcaacaagagtgaaactctgtctcaaaaaaaaaaataaaattaaaaataaaaataaaaaataaaaaatataatcttacccaggatacactatgattcccgaatcagaagtcatgctttttatgatctccagaagcttcttgggcacttcctgggaatatgttctcccacttgtctcctgattctcttcatctagacacgttgtcaaccttctcactctgtcctccatgtctcttaagccgtgtgtctttctgggtgatgccagattacctccaagtcctctcttcagttgtatttagtctgctgtttaagcatcattgaaatatccacttaaatacttatatttcactattttgttcttttccaagcttctctgccttttagatggcattctgttctttcatgtttttccccctaccttttatttctttaaacgtgttaaacatacttatttagtactctataactaattattctaattccgaatgctcttgagaaactgtatagtttgttgttatccaagaactcagagtggtattacctcttgggtcttgtaattttggattgtgagctcatttctggtgaagcttggaatgcctgtgtagacgctgtgtccttccaaagaggatttgctttgtttccagtagatgttcttgtacactatagaattgcagtcagtgtaatttcttatccagggattatccacaacatctagatggtgcaactttgaaccccaaatacatgtaagaggacatgtggttttcatttttaaggaacagtctttagtttttcccacccaagtcaagagagagaacttcctttgccatctcctttcaccaggtagcagattcttcttactccattttttcactcaatgtgtcaccctttgaggattccaattgtatttggaggggtctcaattctaactccctaccttttaaggtcccaagagctttctgtctcttcttggacagctgctaaacttaagtttctcagtttccaagactggccaatgcctctagggcggttctagtttcagaatcagctacaatcctgaggtttcaaggtatccctttttcttccagccctagagacttcctttattttcctgggtactcagctatgcattcaaaaaaatgatttcttatatttatccaacatttccaggcactttacatagaaagattttctgggataattaatcccatatattgccagaaatataaataccttctttttaatccatttcaacattggcttacatgctcaaaaacagctatcagcaaggtctttggtgacctccatgttgcccaacccatgaccccaatgatttccatcttctttgacctatggtagcttcatcttggcctctgcgacaccatactctttgtcttccacatgtctggccagtcctcagtcaaatttgctgattcctcctcctttacttgacctctaaatgttgggagttcctccagtttccattctaagccctcatttctcctcactgcatgtacattcactgcctggttaatctgctgatttccacagctttaaataccacttacttacagattaattcatattttaatcagactctcttctgaactccagatccatattatctgactgcctgtggttgccacctatatttggatgcctttaacttaacatagtttaaagagaactctaactcatcctcccacagtttgcttctctctcagtagtctccattttaggaaatgacatctctttctacccaactcttgatacaagaaacctgggagtcattctggacacctccctgttttgcatcctcaacatccaattcatttacaagttctgttgatttcacctccagaatatacttaaaatccctctactgctttctacctgttcccttataactctagtccaagccaccatcaactctcatttcaacttctacaacaactaaattaatctcctattactgaccttttcaaagtattctctacctaggagccagagtcatcttttaatccctccaatgacctcccattatacacagtgtaaaatccaaaatacataacaagccaggtagatcttttccccaactatctgtctagccgcaccttctgcaactttcccctctgcaccagctgcaatggccttcttgcagtgcctgcctttgcttcattctctctcatccctggatcttcacacaatgctgttctgtctgaccagaatgctcttcctgccccaccgactgcccactgctctctacctggttggtgtgttgtcatctttgagactggcttacatttcacctcttgagagtgaatttccctcaccccccattccaaatgagcacatgtgcttctttttcatagcacataaaacaacttgtagttgcagtcatgtacattatgacattttggacaacagaccatatatacaatgatggccctgcaagaatacaatattgtatttttactgtttcttttctgtgtggtttttttttgttgttgttcccaagttttattcaagaactcatacaaaatatttcagataaatggaatttaatccttgtcttcctcctcttctttgtcctggttaatctggaagtaatgtaattcgtaactctctttgctgttagcaactatgcgcagccaatattcttcaaatattttttgttgagatacttcaaatacctttttgagaaagggacctcggatgtcacagtgatcttgctcttgctcctttcgatggtcaccacccctccaccaaggttcccagcttttccattcactttgatcctttcttgcaaaaactgctcaaattggcagcatctgtgattccatcttctacggggtgggtgcaatcaagagtgaacttcagaacctgcttattttttttgccccccttcaccacaaggtttttcacaggagccatggcagcagcggaggcagaaagggaggtgagtgaaccccttttctgtgttgagatatgtttagacacacaaatatttaccgttatgttctaattacctttagcattcagtatacagaaatatactgtagaggtatgtaacctaggagcaataggctatgccatataacctaggtgtgtagtaaactataccatctaggtttgtgtaagtcactctaggatgttccaacaatgacaaattgcctaatcatggatttctcaaaacatatcaccatcattaacgatgcatgactgtatatgttttttgagtgattatatctgtgtgtgtgcgtgtgcatgtgcgtgtgcatgtatgtgtgttttaagagataaggtctcctctgttacccaggctggagtgcagtagtgtgatcatagctcactgcagccttgaacttctggcctgtcttgccctcccaaagtgcttggattacaggcatgaaccactgcacccagccacatctttgttttgattgcctgctagactcttgactccatgaaatcatttatttataaatccatgaaatggatttgttttgtctattgcaacatatccagcgcctaatcaaatacctaacacagagtagccaaattttacttatgaataaatgagaacaaaaaaaatatttctcatccaagtctctggcaaatcaatatctagaaaacctgtttcttgagttttgattagatagaggggcaatttcaaatctatacgttgtgaccttggggaaatcatttaattgtccatttcacagctgctcacaaaagacagctacagagtttctatggctgcattcctataacactccactccactgcaatgccttttgatttgaaagtgtctccaggggagacttatcctgggtcagtgaggggtgaggagagcagcacagtcagtgctatggtttggatggggtttgtttgtccccactaaaactcatgttggaatttgatccccaaaggggaagtgctggaggcaggcctagtaggaggtgtttgggtcatggggacagatccctcatgaatggctggtactgtgctcaccgtagtaaatgagttctcgttctggcaagaccagatcgagaatggattggtttccaagaacagtaggctgctataaagccagggcacccctcaggtttccctctttgcacctgtctgcttcccctttgaccttttctgccatgtgatgacgcagcacagaagccctcaccagaagccagggccgtgccctggaacttctcagcctgtggaaccatgagataaataaacctcttttccttatacattaccagccacaggtattctgctgtggcaacaagaaatggactaaagcagagcctaaaggtgttgaggggcacacaggcacacgaggcttctgaggaagctgctgtccagccatgctcaccaggaaatgacatgcacatatgctctgtaatccagcagctccgttcctggaagaatgcctccgagaactctgcacaagccctcaacaggttcattgtgtcaccattttagtaggaagaagctgtacccaatttgagtgtctgtgcttaaggaaatgaatatgtagtataggcatataatggaaaactatgaatcagtcaaaagcaatgagctgactagagcaccatgggtaggtgtcaaaaacataatgtgaggccaggtgtggtggctcatggctgtaatcccagcactttgggaggctgaggtgggaggatcacttgagcccaggagtttgagaccagtctggcaacatagtgaggccctgtctctatttttaaaataaataagtaaataaataaataaataaataatgtaatgtgagttacaaaaggaacaatgagctttatagctcaatcccacttaggtaaattaaacatatacaaaatattatttatgtattaaggatacatatgaatccaaatatatgaaaggtaagttggaatggtattcattaatacactagagtgggttcccaaggacaatgacaatgaaaaaagaaaatgatcctatccatccaccagagcatctgccaacagattggaaacccatggccacacaaagcagagagaagcttggccctttctctgcacttacttgttccccatattggtgagacggctgtcctgcattaggcattcggtcatggctgcaggccagagtaaactaactttcataactttgactttaacatcattggtttcttattatggggaaatgaactgtgttttttttttctgagatggagtctcactgtgtcgcccaggctggagtgcagtggcatgatctcggctcactgcaagctccgcctcccgggttcatgccattctcctgcctcagcctcccgagtagctgggactacaggcgcccgccaccacacctggctaattttctatatttttagtagagacggggtttcaccgtgttagccagaatggtctcaatctcctgacctcgtgatccgcccgcctcggcctcccaaagtgccgggattacaggtgtgagccaccttgcccggccatgaactgttgttttttaaataacatatatgtgtacgggtggcagcctctggattagctatcagcaaccctcacaacttctttgccttgtactagagggtgcaaagccgaaatctttgtccagcttcctctgcagccagagccagctgtgggtggcaacggcatcagtgaagctagcctcccctatcgtgtgtgttagccacgcttgcttcaccttcctccagctgcaaacttgtgccagcttcacgttttctagtggatgttttgccgttttcttgctgatctttagacatgcattactttattctagttattcatcacatcagttttagatattgcaaacattttcttctagtatatcacctatcttttatctatacagtgtccttggtcaaagaaaaattttgaattttgatatagtcaaatctatctactttttttccttacagattgcactttaaaaacaaaacaaaacaaaaaaacaggctgggcacagtggcttatgcctgtaatcccagcactttgggaggccaaggcaggcagatcatttgaggtcaggagttcgagaccagcctgactaacatggtgaaaccctgtctttactaaaaatacaaaaattagccgggcctcatggcagctgtctgtgatcccagctattcaggaggctgaggcaggagaatgggctgaacccgagaagtggaggttgcagtgagctgagattgtaccactgcactccagcctgagtgacagagcaagactccatctcaaaagacaaacaaacaaacaaaaacagatgaggtcttgccctgttgcccaggctggagtgcagtggcatgatcacagctcactgcagccttgaccttctgggctcaagtgatcctcccaccttagccccctgagtagctgggactacaggcctgtggcaccacacacagctaattttcatatttttctgtagagacagagtctcattatgttgctcgggctgggctccaactcctggcccaactgatcctctcacttcagcctcccaaagtgctaggattacaggcgtgagccacaatgcccaaccactttgcactttttaagccttctttatgaaatctttcatttggctatataattttacctttgacacgtaggtctctgatgcatttagaggaaggacccaatttccttttttttttttttccatatagctgaagccagttatcccaacataatttacaaaattctttccccaggatttatgatgcatgctatagcccacccaattcccacagggtatttggtctgcatctgcactctctcttctgttccattgctttatttgtctcttcctgcccctaaaaccacatagtttcaatcaccatggctttaaggtatgtctcaagactaataaggtcaatccctcccacccttgcttgtcttgttcaaacctatcataggcattcgagaatctgactctttcgcaaagatggacactcaggccaggtgcagtggctcgtacctgaaatcccggcactttgggaggccaaggcaggaggaccacctgaactcaggagttcaagaccatgctgggcaacatagtgagacctcatctctaccaaaaaaaataaaataaagaaataagtcgagtgtgttggcatgtgcctgtgttctcagctacgcagaggggctgaggtgggaggatcgcttgggcccaggagatcgaggctgcagtgagccatgattgcaccactgcacgctagcctgggcaacagagtaagtccctgtctcaaacaacaacaacagcaacaacaacaaaaacaaagatggacaccaagtcttgcaaggacagcacggcagggaaggggcgcagggcgagctgacctctcagtctgtatatatctgacacctctgaaaacacttctgccacttaaaccctcaaaacaaaagaacgatacattctctgtcagtatattctctaaaaccatgagagacgctactcagtatgatttaaacagatccccaaacatctttcaaccaacattataggtcactgttgggaaccaacagatattaacgtggttttttgttttgttttgttttgtttctttgagatggagtctcgctctcttgcccaggctggagtgcagtggcacaatctcagctcattgcaagctccacctcccaggttcaagcaattctcctgcctcagcctcccaagtagctgggattacaggtgcccaccaccatgcctggctaatttttttatatttttagtagagacgggatttcaccatgttggccaggctggtctggaactcctgacctcaggtgatccaccctcctcggcctcccaaagtgctgggattacaggcgtgagccaccgtgcccgactattttatgtctttcaaacagttcacaccagtgacaacatccctctgtgtttttggtgttaatgctaaactctgtcagtggccccttatggaacgtagctggacgtcacccgagtccccagggcaggagggggtgctgcccctccgggactcactcagctcaggggacaacagggctgtcaacggtgcctctatgatcaaactgaaggttactgattttttaagtgtaagcagtaaactgaaggatgaaactggctgtgagcaactaaccattcaagtttattttctctttgaattggaaatgctcaaacacgtctttaaagttcaataacttttctagttttaggctggtgaaaaaaggtttggggttgttttgcttttagccagaccacatacaatgaaggtttcccacggtgactctgtcattgggaatccactggaagggaagtcccagttaagtggcagtgagttattcccatgtaaaaagaggaaaagcaatcctttcacctccactgtgctaagataagagttattttcaagtcagagtcatagcggaagaaaaatatttcaaatgaaaacaaccacaaagaggtttgcggacaagggaggacagaactcacggcaccccgtcggcagaggaaggcagcggcgcttcccgcgtgcacacaacagtccctgcggcccgcacacccctggctgtcatcggggaggccgagtcctgctacctgtcctgagtgacaaggcgggacgacaaatgcaaactcagagctggcactcagcgacaacacagacctgccacccgcctgccagctccatcgcagcactgggggcaggagggcagcccaccacgccgccaggtggccagggctgcaggttcctctgtcgctcaagccacatccacactcctggacggccacaccatccccacaccaccctcccacacacacacaaagaaaacggaccccactcgggagtcttgcagacgcataggagctaagacccacagaggggcctcctctcctcagggcaccaacccttccacaggtatttaataagcacctactgtataccagacattggatgggctgtttttcagtcaaaagcccagtgagtgctggggtggtgttcccaggctttgtttagcctgaaccttcctggctaaacctcggcggctttacaaactctctagggtgcctctttacaaagtgcgcatccaaagccacggtgatgtccctgtctccaggaacgcatgaatgccaagactctgcacgtcaccatccctgagaccctgggtttgccaggcacccagcccctccgagagtggcccaggagaaacaaatgtcgccactgtggatcaggcctgagggcctggggcaggtactcagccatatggtcccagtgggcaggggctcgtgtggccgagtccaggcagccaggtccaatactgcagctctcaatagagggcaggtctgcctccagggaacatctggccatgtctgcagacatctttggttgttacaacttgggggtgggggcacaggagccagggacactgctcatcgccctgcaaccacggacgcctccctcagcaaagatgccccaacctaaaatgtaacgggaggaagggagaaagcaaggaaggccagccctccccgggctctgcgcgggtttaacacttacccctcctgcaaaggcaaaccaagcctcccctcaccgttccccagcccctgacaaaaaccacatggccctgtcatcgcccctccccagtgcatctaagtggctgctgtcttatctcggtgacaggacccaggcccctctgtggggcaccagccctaaatacagccttctaggaaaggggagtgagagccacttccagcccggccatacctccagcaccagcctcctcctggaagagaccctctaggtcttgtgactctggaaatcagggggaacctggtggctatgagaaggagacatttatggaaaacaaaaacccaaagtgcctgcgtgcatttctacaggggggtagcagtgaactaagtgatgagtgaaccggcaggaagcgcctggctgacaccttccccaccagactctgtaggggagtccgaggtgaggggcaggggagaggcctgagagactttggcgaaatgcttcccctgaaatggtgcaacccgttagcccaacccagaaccaatgtgactctgtttttcttttgagtcagagtctcgctctgtcacccaggctggagtgcagtggtgcgatctcagctcactgcaacctccgcctcctgggttcaagcgattctctgcctcccaagtagctgggattacaggtatgcaccatcatgcccggctacttcttttatattttcagtagagacggggtttcaccatgttggtcagactggtcttgaactcctgacttcaattgatctgcctgcctcggcctcccaaagtgctgggattacacgcgtgagccaccgcgcccggccaagtgtgactcttaccataggagtaatgggaaattattgaaaaacagtgttacagtgttgagcaacctggggctggactcgttaacacaaacgtacatggtcacacatgcatgcacacacatgcacaccacacagacacacacacatggtcacacgtgcacatcacatcaccacatgcacaggccaggggtcccttccctttctcgccactttttccaggtgagatcgaactgttatctcaccagggatcagggacagccccacgctgggtcctcttgggagagaatgcaggagctgaaggggccctggcgtgcgctggacctcactgggcctgccctgcaggggcagatgtgatcctgccatcccgccgtccttttgaaactacaccacccacttcagtaggatttgtttcactgcagccccccaccttcccccaaagcgacacggtgacacatgccccacactgagggccactctcaggacaaacagacaccacagcagccccatcggtgcccagggaggcgcaggacaggcgggctgctggaaggcgcagagctcaccatcaccggaggtatgtaatggagaggacacggtgggtgttaggaaagcctccccaccacgattcttccacgtcactccaacctgaggcaggctggcgcccacggctgctggagaagctgctacagtgaaaaacccctcggcttcccacctcctccccttctctggctctcagtcgttccccttggaggggcgagggaggaatcgcctagtgccggctgcaaactcactcagggggacgtgggacacagcaaaggctcagtgccctccccgttccgtgcctccaagccagcaggagagacctctcagaggcgggttccagggatgtgcacagaggccgcctccaacccacggaaaggccgtgcaggtgtctcacgcagggaacagttccaagtgggagactgtgtgtgtgagcacctgtgtggacatttctctgtccaggtacccatgtgtcaccacaacaaccgaacacactctagcgcaaagcttctgggcgcgggcctgtttgaggcagggctgtccagctacagtaaggtctgtgcggggtcatccccagcggagcctggcttatccacgtggggaccccctgggtctagccttcccccggctccaggcagaggctcaataaccgttctgtaatgagcagaagcatgtgtgcatgcctctaccagctgctccatctcaaaccacccggccgcctcagtgaaccttcttggcatggctgagggtcacaggagtccctgggccacagccagagaaggtcagcaaggaaggatgagtgcccgaggcccagggggccagctctgggtaggtaacacaacctgctccagcccagatgagtgtgtcagtatggctgggcagcctgatggactctctttggcaggtttcgaaaaccgccacgagcttagacaggctgtgagcaggggtgctttcgctcgccctgaataatttaacaggaatgattccaaaagaagtgcatgagcttggccgggtgtggtggctcacacctgtcatcccagcactttaggaggccaaggtgggcagatcacctgaggtccggagttcgagaccagcctggccaacatggtgaaaccccatctctactaaaaatacaaaaattggccgggcgcggtggctcacgcctgtaatcccagcactttgggaggccgaggcgggcggatcacaaggtcaggagatggagaccatcctggctaacacggtgaaaccccgtgtctactaaaaatacaaaaaattagccgggcgtggtggcgggcgcctgtagtcccagctactcgggaggctgaggcaggagaatggcgtgaacccgggaggcggagcttgcagtgagccgagattgtgccactgcactccagcctgggcgacagagcgagactccatctccaacaacaacaacaacaacaacaacaacaacaacaacaacaacaacaaaattagccgggcgtggtggtggtgcatgccgtaatcccagctattcaggaggctgaggcaggagaatcgtttgaacctgggaggcagaggttgcagtgagctgagatcatgccattgcactccagcctgggcgacagagagagactccatctcaaaaaaaaaaaaagaagcacgtgagcctcagacaagctcctgtctcctgcaacatgcactctggccccaccatcctacactggcagtcgcctatcacctgtgaagacggcgggccttcccagggctcctcctcgcccggtgacacacaacgcaatggcctgaggacaggccaggctgatccccagccacacagcagcaaccctggcccgtgctctgcagccccaaggtggccctgtcccactcgctttttgcccgctgcttggcagaggcaacgcatggtggaagaatgaccgaaattctgtgtctgacattgaagagcctttgttcccgtgcagaaaacatcccaccatgcgcctcctccctttcgggtttcctggcctcacaggaggtctttttgaatcaggaggggagggaccccatctctgccaccggatcaccggtccttccaagggaccactggatcgtgacatggcagggtcaggatgaaaaccaaatcccagaagtggcgacctctgggtggaggaaggatccccaggtgcaggcaattgggggtgcttgtctgagcagactttaagagccataattaaagcaaccacaagttactctttttattgttatttttttgagacagggtctcactctgttgcctgggctagagtgcagtggtacaatcctggctgcagcatctgcggctcaagccatcttcccacctcagcctcctgaggagctgggaccataggtatgcaccaccatgcctggctaatttttttattttttgtagagatggggcctcactatgttacccaggctgctctcaaactcctaggctcaagcgatcctcctaccttggcctctcaaagtgttgagattacaggtgtgagccaccacacccggccaaatttattttatttatttatttatatttgagactgagtttcgttcttgttgcccaggctggagagcaatggcatgatctcggctcactgcaacctccgcctcccaggttcaagcgattctcctgcctgagcctcctgagtagctgggattacaggcgcctgccaccacgcccggctaatttttgtatttttagtagatacggggtttcaccatgttggccaggctggtctccaactcctgacctcaggtgatccacctgcgttggcctcccaaagtgctgggattacaggtgtgagccaccgcgcctggccaaaattattttttatgacacacacctattaagataatcaacttctttccaccaattgaataaatcaccagacacagtgggccccaggccccggggctctcaaactctgcggcaggcactcaacgccacccgtgctctcggcactcctcagaccgacaatgatcggctgcccgtggccaggccctcctcaggaaggcctcccaccacccaggcacccacagacccgcggtacgctgagtgcaccgtggtcacctctggagaccttgcaacccggcaatgccacgtaggttttggcctgggacagattccttgattgtcttttcacttcattgccccaaaaactccccgacaaggtcgcaggtgctaaaggacttggagggaccctgtatttaacaaggcgtgcgtggttgctatggtcaatgagatgactgctggagagctggacaataatctgatcagacaaaagaacagatgtggcctcaaatattgcaagaatatatcaggagcctctgaggaacaccagccagcctcctgctgcgtagacaaactacaacttcccagacagctgaggtgaaagtggtgagtttaagaggaaacctttgggaggccaaagtaggaggatcgcttgagggcaggaggtcaagactatcctgggtatcacagcgagactcctgtctctacaaaaagtaaaaaattagctgggtgtggtggtgcacctatagtcctagctactcaggaggctgaggtgggaggatcgcttgagcccaggaggctgcagtgagctgtggttgcaccactgcactccagcctgggtgacagagcaagaccctgtctcagagaacaaaagaggaaggcttcaaacatccaggacacgggctccgactgcctcctgcagagcgagcccgccccacgcatgtcccctgcaccactccttctccgcctacctcggctggccttctcagcgctcagacccacggctcttcctgaacctgtggcccccctcacctgccgtgatggtgtccacctccttggctgccagctcctccacgtccgacctcttcctcagctcaaacctccgggataaaccttctcggggtttccataattcctggatcaagaggggcttctcactgtccccaaacacccgaaagcaccgggcctgccaccgctgcccagcatcgccggcttggcccaccacgtcacacagcacgtactggccggcctgcctggggtccagggcgtaccgctccagcgcctccttcaccagctcacgggcgctggaggtgccggtggccaggacgctcttgtagtgggttcctgtgcagacactgtccccaaacaccttcaggacaccaggggccgacagctgggtggagagctcggcggggtcatcgctggcgcccaggctggagaaggtggagtccaggtcccggtacttgtagctcagcgtccgggacagcatgctggacaacagctggctctgccgcttcagtttgctcttggtgggcggggacatgatgaagtgcgtcccataaaacatggtgggtgaggcttcatggatgaggactgtgggcttcagccaaaggatgtggggaggccgtgacctgggtgaaaaagtgagagaggttagcgccaaccatcgtgaccaccaagagcaaatgaggccacaggcggtgactcctgcccgtcatcccagcgctttagaaggccaaggtgggaggacggcttgagcccgggagttccagaccagcctgggaaacatagtaaggccccggctctacaaaaaatttaaaaattagccaggcatggtggtgtgcactgtacccactgctctgaaggctgaggctggaggatggcttgagcccaggagttcaagattgcagtgagctatgatagtgccacggccctccagcccgggcagcagagcaagaccccatctcaaaatctaatggacataacaggccgtgggcatcctggccccgcagacctgacaccagagcacctgagcagaggatgtggctggagcctgcagggccaccagagaccgagaggactaaacgggctggagcgcccttcaaggaaagccattactgggaaacacaatgaggtcgcctaagtaagacacgctccgctgcagggcttggatttctggaaagtgctgggcgcagcgcccgtgtgcagtgagcatcaaggagcgccccacccggagccggccccagcaccatcacagccacagaagagcagcgggcagcccaagggcaaagcttcgcctctccgtaaacctcgtgtctcctaccccacaggctgcgacgtgggaaatgggtcacaaacacagtgcaaccaggaaaacaggcgaatcgcagccacgttggcagaatagaccatcagacattccagacacaaacccccagaatctacccctcagggcaagagacccgtcctggcttgaaggagatactccctgggatggcagcactgagtggcctcgcaagcacggcgggcacaaagggcccctctcgagccggtgcaggcatggccggaatgcaggcgtcccgcccaccacaggccgcgggtgcccggcgctccaggccacagagatgcagtctcctggggaaacgggaaaacagcctgggacgcgttggcgtgtcatacaatcacacttctaatgtccgtagcgtgcccagggccaggagttccagatggtttctcagtctccctccagaacctctgtgggggcaggagggcagagaaaaaggaaggcaggtctccgatttggaaaaggtgaggctggactgcaaggcaggaaaatactggaaaactgcgcacacatctccccattactgtaccccacttccgtgctcatgttctcaccaaagacaaaggtggcagacgagtgagccaggaggaaagcctattttctggaaagctctggaaagagtggtccaggtcccagtgaacacagcacgggtcgcctgccactgcgaccggggtcagtactaaacaccgcagcagccaactgtcactgtccaggcttgactcactcgtcacgctgcgggcgctgcaaaaggcttctggaaaggacggtggctgcctagggccacagaaagcaaccagggaacccctccaaagaaaaggagccacactgtcccttaggaaactaaacagtggaaccgccccagcctccaaagctgacactgcgaactggcctctttctaatatcaccggggcgtgggtcatcttctctggagcctctcactgcccgccagagctgtcatgggtgagtcctgaaatcagaccaccactcgcttcctccagaaccagcccaggtcagccagcagctgtgctttctccgaggaccttgaactcttcagaaatacttccgacagcttcgcacaccagagactgggttcccaacgcggacgtctgccctgcggggtgggtggctggcccttctcctgttcctatagcccactgcggacacttcaccacggcaaaggctttcgctgtgcctggctttctgaagaggtgaatttgctgtaacaggtcacggagttcccagtacaggtcataagcagatggagccttgaggttccatcgagccaggccataaaggagtaaaggagcaaagcctttgtttctcttcctctgaggaaggtgcaacgagtggccttgtcaaatcctaagaagctcagagccggccgcagcttcccccacggactcatcaaaggcctcggtttcatttacaacaaaagcattttcagacagtgctcacatcacaaacgtgcggcctggcctgtgcacaccacaccagcggcttccaatcgccctctagtctgacctcagtctcctgtggtcagttttcaaagtgagtacttggaatcacagaacaaaacccctcaaagagcctctccagccggcacttattaaccatccatgagagctgcacaaccctgctccaaagcacctctccagatgccccaggcttagaagcctccaggcagcacacactggcagagggtcggccaccaccttttcatagtgctcatttccaacgggttccccagggtgcaaaggcaaagtgcaggtggtggatggtacagcctctgccaccaggcagctgtggctcaggaaacctctgcctccggagatgaagtctgaatgctgatataaatacgataccaaaaactggggaagccccctccaggcaggagaaagcccatatcacagaaaagtcatgaagcagagccaagtatttaaaaggccaaggcaggagaatggcttaaggccaggagttcaagactagcctgggcaacataacaagatcccaatctctacagaaaataaaaataaaaaattagctgggcatggtgtgcacctgtagtcccagctactcgggaggctgaggcaggaggatcaccggagcccaggagttccaggctacagtgagctatgattgcgccacgtcactccagcctgggcaatggagtgagaccctctctgttaaaaaaaaaaaaaaaaaaaaaaaaaaaaagatggctgggcacggtggctcacgcttgtaatcccagcactttgggaggctgaggcgggcagatcacgaggtcagcagatcgagaccatcctggctaacactatgaaaccctttttctactaaaaatacaaaaaattagccaggcgtggtggtgggcacctgtagtcccagctactcgggaggctgaggcaggagaatggcgtgaacccgggaggcggagcttgcagtgagccaagatcatgccactgcactccagcctgggcgacagagtgagactccctctcaaaaaaaaaaaaaaaaaaaagacaaaaattggctgggcatggtggttcatgcctgtaatcccagctctttgggaggccgaggcgggcagatcacttgaggtcaggagttcaagaccagcctggccaacatggtgaaaccctgtctccactaaaaatacaaaaattagctgggcatggtggcgggtgcctgtaaccccagctacttggcaggctgaggcaggagaatcgcttgaaccccagaggcagaggttgcagcaagccgagatcacgccactgcactccagcctgggcaacagagtgagactccgtctcaaaaaaaaaaaaaaagacaaaaattataaaaaggcccccaaatacaatggaaaagtgagttgatatttggggcccaggggtggatatatgttttgtaaggtctgacatttacataattcttctttaataaaaaacaaatagaaaattacaaacacacaactgctaggtctcctcccagggtcttagaagcttgaacttcagaaatgttgttccccccacttccccccacccctgcttttcccacagtttccggagccggattcgaaggcagaggcagagttagcagtatcatgaaacaggagaaaatgtaagcagagagaatatgattgactcctttccaataactccttcttaagcccccagaagtccctgttacacaaaccttatctgttttgggattttcagaaagcatttctctccgtttggtcatcctcccttggccagaccagagggtgcccacttgttcacacgctgcccgcttccgaatcccagaaggcggagcctggcctgtttgtgagaatgggatggactcgttttttaaaaggccaaggggagtgcaggaaaatccgaccgggcggagcacgccctgggtaacaagatctgtttttctggaagtgcgaccggcctcttctgccccattcgctcctctgtgacacaaatacttggggaaagcgcagggctcggacagcgagggtgtggggcgctggctggtgctgctcttagagaatgttttctcttgttctcaaggaagggtccagtttctgatgaaaaacaagctcaagtcccagcggcgagtacagggagtgaggtcagtgctgcgctgacgacatgggtggagcgacctctctgctccaacaggacaatgtggaacccattatcatttccagcaggagggaaaacgaagcgcagactttacacactcagctctctcccctccttccatgaatcctatctttacagccccagcccgagccacgctttcaaatgcaaacataattcaatcagatttaattctgacctgctagctgctggagaggagaccgacttgccccccagcaaaagggactttcaagactggttcctgtctggaatgcacaagaggtggcctatattaaccgcgggacacgagcaatcagattcttctgtgcaattcagattagccaaacacttgacaggcgacagggcagggcaggatggtccgcagccccgccagggccctgccaaccccaccaacaggctcctcctgcgaggccccaggagctcggctcagcatctgttatcttggatgcagtatttgtcgaggggctggaaatggtacataaatagccgggaaacaatgctttgagctggcgcacgagtggggatcgggctgcaaccgggacggggtatgtgcaggggacgtctcgccggcccaggtgggagagcgcgcggaaccctgcgccccgctcccccgctgcgccccgctcccccgctgcgcgccccggacgaagctccccctccagggcacagccgggaaaactgagggccgagagtcccctggagttgggggtccggggcccacgcggacagccaggctcaggagctctcgggggtcggcagcgcggacccccggatccccgcaggctgggccgcccttgcccgcgctagccggcctccgggtaccgccccccggtccaggccggggcccgacagccagtcggttcccatggcaactgggcaaacctgccctccgcgccccgaccagcggccgggagtgtccccgagcgcgccccgcggcctccgcgccccaggtccccggcagcggccgagcagcgccccttacgagccacccccggttccgcagtcactcctcgcgcaccccacactcacctccggcacaacccgccgcgccgccacgttcccgcgctgctcccacccgccgttggctggggccggcgcccagacccgcgcgtgccgcggcgcctcctgccggcggcgcaacgggcggggcggggcctcaaggggacggggccacaaagggtggggcgggggagaacaggtgggctggagctgggcctcggcgcccaataggcagaaagaaagcctcgaggaggcggggtctccaggagaggggcggggccaacctgctagaaaaggcgggctgtgctctggcgcctcctgccggccgcccaatggacggggatgcagcctcgagggggcggggcctcaccggagaggcggggttttgaagaaaggggtggggctggttgtggagaggcgggacttgcagcccacccacagactgcagcttaaggagggggggtccccggaggaagggtgggaccagttctaagtccctgagctgcttgtgggctctgggctcctgcggttgggtgggctatttcgagacagcaccttctagtagcccagtgagtgggtgtaggggagggtagagctgtgcccccaattaataaacatcttctaagacatcgaaaaggaacaagggaggaatttcctctcccctaccatctgtctcccacccagagttttaaaagacaaatcaggtcatggcattcctgcttacaattatgcaaaaaaatgaccaggtcagctctggggctctggccccaactgctctccctggggacttgtttaaaaagcagctcgtgacctcggcactttggctggggttttccctttgaggaatgtgggctagacctgggagattcaggtggttcggaatatcaatatgcagaatgtgggcctcgggagtgaacctttttgtggacagctatcgtggtatgatttccgtagtcatgaccccatattcgcgatggaggtcggagcagacattgatgagtgtgggaacagacatttattgaccacctgtgtgccaggccctaggcaactttacctaggtcacctcacttaatgctcacatcaattcttgtgagacagagatgtctgagacattccaggcctcccctttcctccacctatcacctgctaatcctaaagtccacctcctaaaccttttctaataaaaaatagtgcctcaaagtcaacacagagagacagatttgagccaggctcctgtctccttattgatcaactcacaatacggacaaaaaaagcttttgtctcaaaaacttaatgcagtaagattggctttttttttttttttttttttttttttttttggagacagagtcttattctattgccctagctggagtgcagtggtgtgatctcagctcactgcaaccaccacctcccaggttcaagcgattctcctgcctcagcctcccgagtagctaaggttaacaggcacctaccaccacgcccacctaatttttgtatttttagtagagacggggttttgccatgttgaccaggctggttttgaaatcctaacatcaggtgatccacccacctcagtctcccaaagtgctggaattacaggcatgaacctctgcacctgatcaagattggcttctag

SEQ ID NO: 498 - DNA, 132978 bp, Homo sapiens
  source 1..132978: mol_type = genomic DNA
ttgagaacctggacaggggacttcaccactctgcgcctgtttcctcatccacaaaatgtgatgagccgacctcacagagggggcaccaggatctaatgagaccatgcacagaaggggcacagcaggcctgggacagagtgagggccccccatctatcacaataccttattttgcagatgcaggattcacttgtcccaggtcacccacaagctctgatgccttgaccagctcccctctgccctaccaaaggacaaatgagggaggcttcgatggggctgttaatggggtcatatcccacagaccctagagcctgggtggggctgagaggcttcccaagcaggtggcagtgagctcccacctgagctatggcaagtagagacctaggcatgaaattgctccgaggtctgtaccttaagtttcatgcaaggactctctcattcaacatgcctctgtttaaagtctgccagtggctaccttccttgcactagaattgcaaacaaattcctcactgagctctctgcagccctgcaggctctggccctcccgatatggctctgacttcaatgtgcccattacttgtccccttgctgacggcctcctcacaattccacttactcaccaagttctctcctgcctcaggacctttgcacttgatgttctttctgccaatgatgctcttcccaggagggcaggcccctgtagtcccagctactcagaaggctgaggtgggaggactgtttgaggccaggaattcaagttcggcctgggcaacacagcaagaccctgcctctaaaagaacaaaatgctcttcccagactctacccatggcggttcctcttgctatttagatctttgcacagacaggcctccttctctctcccccagccaaggagccctagccgtcacttcacctgctaattttcgtcctagcacttactgctctaaaattatcttcgtcatgtatctaagcatttgtttgctgtctgtctcttcccaccaggatgccagctccacgacagcagggaccgcattgtctctgctgattcctcaagactcagcaaggtgccaggtgcccagtaaatgaagtttacatgaagccaatggagttttgaaatcgaaaatgtttctcaaactgcaaagaagtgggcacaggtgagggctaatggtggggtgagggtgggggcctggcctgacgctggaagctcctgtacgcagggcgctagtgtcctcccaggccgcaccgggatcccaccgcagaggccccctcccgcaggccggccagcgggcggggggcgcgcagtggggcgcgcggaccgccagggggtgctgtcggggcgcgcacggcccacctggcgcccggggccgcgagcgagcgcagccaggccgcccgggaacttttttcctcgcgctcttgctctccttctccccccgcgcgtcgcccgcccgcccgtccgctcgtccgctcttcctgtgcggaggggatcgcattcctcgcggcacccgcggacaccaggcaggcccggccgggtgcgcggccaaggcccgctccccgcgtccccgggcgccgcccccgcccgcggctgggctccgagagacgagtgggagagcgagtgcagcgagggcgagaggcgagccgagcaggccgccctgcccgcggccctagcgccggcgcgaggagggggcgccgcggcccaccctccttcctgcctggccgcgggccggccgggccgccgcgccccgacccccatggccacccaggcctccgggccgcgaagtcgcagcgccagacccaaggcccccgagtgagcgcgggcgccgaggtgagcagcgagcgccggggcgcggggggcgcagtgtatcctgccccggggcgggggcggcgcgaggcgtcgggatcctaggccgggtgatgagccgaggcgggttcggacgccgagcgcgcgcgctgggtggagatgtggggtccgcggggtccttgctttgtgtggtgtggggggtgcgcgaggtcaccggatggacgtctggggagctgcagggtgggggcgccctgcgccgcggctgagggtcttctgggggatgtgcggccagctgaggtcgggtgggggcatgggggcgcgaggggcgagtgtggcaagggatctgcttgcgccgaggcgcggagtctttgcggagcgtggggtggggacgtggggtgcattcgcggggcgccgggggcggaggtgagctttgtgagtgcgtccgaggtgggggacggggagctgacttccccatgcgtgacccgggcccggcgtggccatcgcttgggagtcagggccggcgaaggccgtgcgtggcgagatgggtgctcgggctctctgcggtgtccctacccgggcagcggccccggggcctgtgcgcaggccccgaggccgggcaggaagcggcccccgcgacctggggagctctgtagcggccaggcccgggaggcacgggcccttcggggatgacgtcacgggcgggggccccggacacgcgagccttgcgccccacagacggcggcgcagcccgccgcccttttcgaggccggccccccctctcacgcgccttgaaggcagggaacccgggaggaggacatgggggccgagtgcggcggggacaaggggtggcaggacgcgagggtgacatttggagcctggtcgcgccaggggcctccgtggtggggcggaggggaagcgaaacaccagccaggccctaggccgtcgcggccccagcttcctggggcgcccgttttcccggctagcagttttctttcttggggctcttggtcgttatccagtccacgcaggggccggagtgcgggctgccgcggtgctctcctgcgcggagcccgggctggcgggggcgcggcgggcctcgggctctgaatggatgggagcgagtgtaacaatgcgccggtgggggctgggggaggggaggccgcgcgcctgaatggcggagccggccgggcgctgctccgcgcgccgcacactctcccgcgccgccttccccgcggtttcggcgggcccggattcagggacccactcgggatctgcacggttcctcccaccaatactgtcccccgccccccttttatgtctttccaatgcagtagtgtgttgagaattcaagggcattacatctggttgcaatccagtttcatgccgctgccgggctgttaagacctcgcgctgacgtcagagcaggggaattacttctttttattttatctttttttagttgtctgctgccctgggaggagaggcgggggtgggttaggctagctctgatgtggaggcgccagcgtgatgggagccccgagctgggggctctgcttctcttcctgcccctgcccccctccattctccatacagtcctcgctctgctcagggtcaggcccaccccaggtggggggcagccctcgctgcagactgaatggtggcccctccctgctgaccacacagctgggttttcagaggctttcctgggacgtggccctcgggatctagaaactggaaaggaatcttctagtttcccacccctccccctcttgacaggcaagccggtatattcggggcccaggagcaaggaaaagtggccttttgcgtgacacagaagtggacacatcattctgatctcagggcaggctcagccccataactctggcaaaagctctcacaagcaaaagccttggagaggaggagaatgtatcaaggtgagatccaggccccagaagccaactgtggagtgggcaaaataggacctttcccaccagcctagcatccctctggcttctgtggagataaagggaactcaggggtactggagctgcctttctcttccactagactgtggggctctcataggcagggaccctgtcttactcctctttgttttatttttgagacagggtcttgctgtgtggcccaggctggagtgccttggcacaaacacagctcacttcagcctcaacctccagggctcaagcgatcctccagcatcagtctcctgagtagctgggatcacaggcgcccgacaccacacgtagctaattttaaatttttttttttttctagagacaggggtcttgccatggctggtcttgaagtcctgggctcaagcgatcctccctctttggcctcccaaagtgctgggattacaggagtgagtcactgcacccagccttactcctctttagactcccaagcctagaccaattgctttcaaattcttgcccgtgacctatagtaagaaatacatcgtaggtaactacacaggtcacactgtatatagctgaaacaaaagtttactgaaataactcccttactgtgtctgctggtctgtaatcctttttgttcttgtgtatttgttttttttttaattactgattgctacccacgaaattaattttgcaatccactgatgggtcatacccagaatttgaaaaaaacaagcctaggaaatgaatttgccatctattcatgcaacaaatgttaattgcaaccctaataattcctctcatgttaaactactcaagtaacacttggatacttgggtgaaaaatgcaaataagccagaaatatatgtagtaaaagtaaaagttcccttggcaccctccctgcaggtaaccccagttaatagtttgaacgtatccttccagactttttgttactcacttaatgcatatatatatatatatatatatatatatatatatatgtatgtatgtatgtatattacatataccaatccatgcatagttttctttttccccaagtgaggacatactgtgggctcttcctcggcagcttcctttttcctctccgtttgtcttggagaggttggttgtgtggcgaagtccttcagggcaagttctgggttgactcctggctccaccacatactgaacaggccatttacctctctgtgcctcagtgtccccatctttacaatcaggagaataacagtacagacctcacggtactgaagtaaagatgcagtgagttaatccatatgaagtttagagcagtgcttttgccaataaatgctgattgctgccgtcattgttgtattgttattgctgttctatctccatggcagcccatgtttgaaatgcattgctttccacagctgcctgtggccatggcatgggtgtctttttcctcccctatccaacgtgtggctccacagggagggaggaggtgcaacagcaacggtgtgcgcagagcagcgtctctgcgggagaggcacctgggcactgggcccaagggaacagggattttccaaggacccactgtttccaaagttctgtgcttaatgtcggggtccaagcaggaagcatccctgcacttgaccacaagaaggtcacagcccagtgggtgattgggacccagctcatagccaaggcctcgaccagagctggaggcttcctggaggaggggcctttgagcaggtgcttcaggcacggcgaggtaagagtgagaggagcattcctggcagagggaacacagtgagcagagcgagtctttggaagctggaagggatgtggcctgtgtgctgtagccaaacaagaggggaggacttggctcagaaagaatggtggcggaagaggttgggctgttgctgggacctcctcactggcctccctgcctccatcctgtcccctcccaggtgctggccagcagcactgtcagagcgatcgttctaaacccagcagataacctccagtggctcctgctgccttatgaataaaggtcccatctgtagttcttcccatgctgtccagggccatttctggtgtcctctgcctgccctgtcctcattcagtcctgtcccctccagccacagctggcacctccttgttaaggtgcagccatgtgcatccttgcctctgtgcatcgggctgggctgttccttccacctgggatgcccctcaccttcctccctgccgccccagaccaaaacagacgtcctgtctcctcctcctctgacctccgaggcagaatgagtcatctccctttgtctatactcgtggcatagcgtttatcacggaattatcggcaattctgccagtgtctgtcctccccatgaggctgaagcatcgaggcctgaaagcacgtctccttgctctctccggcccagtgccaagggcgaggcctagaacacaggacgctcagaaatgcttcctggcaggagggccaggtgaggtggagagggtgagagccccaacattgtctcccgtgggcccctttgatctttagcaagggcatgctcaggtctgtgtggatcttgtgctgtcagcctttagatgagtggggtgaggggcttggtggggtcggggggcagggggaggtggcgggcagcttccccaggctgcttcctgagggggctgggagaaactggctcatcctgttccccagtgattgaggcagagctgtgccctgttcctggtgggtcactggggatctgagattggaatgtgacaccagggaaggggaggcagggtgggaggcagggcttggaggtacaggctggggcttggctggcaaaggacagatttcgctccactggttcttgaacccgtgtgtgtgtgtgtgtgtgtgtgtgtgtgtgtgtgtgtgtgcacgcgcgcgccggggaggggagagatggggaagagaaaaacatgagggcagagaggtggagtgggggtggaggacctggggagtggtgagcagggacagggagagatggaagtggggggacggcaaggagtgagggagaagttcctgctgctgctgctggagagtatgaagagtgtgcttagggccaggaaggaaagcagccaggcgcatcgtctcacaccaccatcagccatgccttccttcgtctgtccagcagacaaccctaagtgttctcttgcttggctccatgcttgcatggccccagacaggagcaagcctgtggtccaggcttcgcacccttgaagtctaggggccaggtgaacaatgagcatccggtttctttcttttttttgagatggagtcttgctctgtcgcccaggctggagtgcaatggtgcgatctcagctcactgcaacctctgcctcccgggttcaagcaattctctggctcagcctcccaagtagctgggattacaggcgcccaccaccacgcccggctagttgagcaacctctttctgcacaaagtgatcaggctgggggagagaaggtgcccagaatgctgtgcagaggcaggagaggagggtggagcaggcgagcatggggtagggggcagggaagccatgtgttaggcactatggtggggagccaggactgctggggagtcttcctttcctctctggcctcggtctcatctgtaaatgggggaagagtggactgctcttgcactgatggtctgtggacccaagtcacccactccttgggcatgagaaaccagggaccccgtggagacagctgatagaacagggacagcaggcatgctcagagcgtctgcaggcccatggtcagggggcttgagggagaacatgcagaatccagtggagcttgggttcgcctcctagagttcccttcttggagactgtgctcatctggaaggcgagatagggtcggggtaggggaaggagcactggattcggaatcaggaaaagtggttgagttttaactgcagcatccctcgggcaagtcactttccctctgtgagggtcagtttcctcttctgtcaaaaatgtgaacgggctttgttgtaagcattaaaggtgagctggggcgccgtggctcacgcttgtaatcccagcactttgggaggccgaggcaggcggatcacttgaggtcaggagtttgagactagcctgaccaacatggcaaaaccccatctccactaaaaatacaaaaattagccaggtgtggtggcccatgcctgtaattccagctacttgggaggctgaggcacgagaatcacttgaacccaggaaatggaggttgcagcgagccaagatagcaccactgcactccagcctgggtgaaggagactctgtctcaaaaaaaaaaaaaaaaaaaaagtgagtgttgctgtgttttgtcatctggaaagcaaggaggtcctatagcttggggccataaacaggctttggggtcacaccagcctgggttcaaatccaggtaccagctgctcactgtggggctccatttccctcccctttaaaatgaggataataggcagggcgcggtggcttacgtctataatcccagcactttgggaggccaaggcgggtggatcacttgaggtcaggagttcgagaccagcctggccaacatgatgaaacccatctctactaaaaatacaaaaattagtcaggcgtagtgtcacatgcctgtaatcccagctacttgggaggctgaggcaggaggatcacttgaaccccggggggtggaagttggaatgagccaagatcgtgcctctgcactccagcctgggtgacagagcaagattcagtctcaatgataaataaataaacaaaatgaggatagtaacaggcccctcctggttgctgctgcacagttcctcagctgggatatcattgctgggctgttaggcagttgttttttgttttgtttgtttgttttttgagatggagtctcgctctgtcgcccaggctggagttcagtggtgcgatcccggctcactgcaacctttgtctcctgagttcaagtgattgattctcctgcctcagcctcccgagtagctgggactacaggtgtgcgccaccatgcctggctaatgtttgtatttttagtagagacggggtttcaccatgctggtcaggctggtctcaaactcctgacctcatgatccgcctgcctcggcctcccaaagtgctgggattacaggcgtgagtcactgcgcccagccttgggcagttatttttattgctaaagtgctttgtatgtagaagagatcaccattatgattattattttttttttttgagccggagtgttgctctgtcgcccagactggagtgcagtggctcgacctcggctcactgcaacctctgccccctgggttcaagcatttctcctgcctcagcctccctagtagctgggattacaggtacgcactaccatgtctggctaatttttttttatttttagtagagatggtgtttcaccatgttggccaggcgggtctcaaactgctgacctcaggtgatccacccgcctcagcctcccaaagtgcagggattataggcgtgaggtgagccaccacgcccggccaattattcttcttccattcatgccaggtcacatctaacccttacctgtaataacattggccaaaatgaggagtttggtgcttatttcttttctagccaggtcaaggcagatggattgagtgggtctttttacacatggggcgggtgagaattactagttttctggccagagtttctgtatgtaaagggactttgccccagtggtgtaggtggaccccaggaaagcatccagcaacttgtgactttagtggcagtataaccacaaactctcattcattcgttcatttataaatcacgtgtagaacaccagggtactgagaaaacagccatgaatgagatgcagctctaatgtagcatagtgggtatgcatatgtattttggactttgcctgggttcagatccagggtctaccacttgcgaacttagccaagttatttatctcctttacttggttctgtcatctgtaaaatgggggaactgatagaatctacctcatagggtggtcgtttgttcaagtccagcatcaggtacatagaaagtgccagagcatggcccttcctccattgttgcttttatttctgccctgaaggatctcatggaccagcttggtgctggaggaggtcaccctggccaggcttctcagtgacggttggcatccagaaaggggtgccaaagccccccaactccttgaatcagacccttctatagtgatctaaagctgcttctctgcttgactgttggggcctgatgctggggaggtcctgtgaggccttattgacctgggaaagtccgcctttgtctggcgccaggtgtgcttgattttagaaggaatttcattcctagccgggcaccgtggctcacgcctgcaatcccagcattttgggaggccgaggtgagtggatcacctgagcccgggagttcgagaccagcctggccaaacatggtgaaaccccatctctactaaaaatacaaaaagatagctgggcgtggtggtgggcgcctgtaatcccagctactcaggaggctgaggcaggagaattgcctgaacctgggaggcagaggtggcagtgagccaagatgatcgtaccactgtactccagcctgggtgacagagcgagaccttgtctcaaaaaaaaaaaaaaaaggaatttcagtctcaagtatgaaagcagaaagtgtttcctgattgaggactcctcaccagccggaggcagcaggactgcctgcctctgtgtgtctttaggcaggttcctcaagctccctaagcccgtttcctccttcatcaaaggcgaaagtaatagtacctatttcatagttttgttaagaggatcaaatgagatagggcctctaaagcacttagccagtcctgggcacagaatagtgtgcttagtaaatattgtgcctattagtgataatcagaattctcagacaatgtaaagtaaaaaccacctgaaagatttcttaggagctacagcttcatagagatgtgaagttgtaaacctcccagagcccaagtggacaaagaattgttacagcagctggagagacaggagacccagagaagcttaactcctgtagcaaagtcacccagcattctggcttggggtgggcagggatggggaatcagagctggctttcagtctggtgctctctggtgctttgatagtgattccttcagcaaatagctatgggcaaacagcattgatgcacagctgaggtcatatgggcctgtcttctggaagcttctgttctgatagggaaaatgaaatttctacatgatcatgatgagaggtaaaataaaatcacatgttctattagaagggtaaagtcatcgggtattcactcattcaagggggctctgtgccaggctgtggagcagtgggtctcattcgggggcgatcttgtgtctcaggggacactgggccatgtcaggagacatttttggttgtctcagctggggaggtgctgctggcatctagtgggtaaaggccatggatgctgctaaacatcctaccgcacaaggcagcccccggaaccacacaccagctggcccctgatgtccatgtgccgagggttgagatccctgtcttgggaagcagcagtggccaagcagatggagcccctgcccgtttgaagcatagagcgtggtaggtgagcagacgttacagaaatgattgcctagatatggatttatttgtaatgtgagctatgaaggaaaaggtagcgggaagaaagagggatgcgagcccttctactcttttaagggagggcctttggggaggtctttccagctgagggcacagcccaggcaaaggctcagaggcagaaagtgcaggagtgtgttgtgggtggggaggctaccaggcacctggtgtgtgcccggggagaagtcagaaaaaggcctggcctcggggggcccaggaagtggcttccagaggtggggagaaggcaaaagagaggactaaaccctttagtctgtttgagggaactccagcccccagcatgttgctctctgggggatccagcagggccaggtgggcagtgggagcaccctagccccaggtgctaccttccagcctggggccaagccttttccctttctctcatttgcagctttctgataggtgggaaagagaagcaggaaaaaagagcagaggaaaaacaatattttcatttcaaacacagataggggtgagggaggcgggaagtaatctggtttatgatacctttgagacaagcacagaaaatccccaccgtggcccgaaatagcactaaaacagacgttttgccaaatcagacttaattgagtggctctcttcttgactccagcaggatgtggctggagctggctttgttcccttggggtgacactgtcccctggggcccctgccctggctaattaaacaaagaggacctggtctcctaggcaggacaggagcctggggagctgaacttgacagcccttggcctctgcctgagagggccagaaatggttacaggggttgggaaggtggggggttcctgacaggagggccaactgagtgaaagcattggtgggagaggcctggttcctctaatatgtgaatatctgtctctttggatgctgaaagggatggagaaaagccagcattgagtgcctactattgtgccaggcattgggtggtcctcgctaagtcttattaactgccctatatccattatcaaggaaactgaagcacagagaggttaagtgatctgcctgaggtcacacagcaaccaagtggcagagctaggattagaaatcacatccgcaggctccaaagccaggccctgcctgctgcttacccccttccccatgttagtcactcatccattcgggagctaattcctggctatgaaataatattgtgaccttgtgggaagtgaaggcttgcagtcagacagccatgagcttggcttctgaccaaagcagtttttcttttcatggttttctccctcagaacctcctctttcctcatctatcaagtgggcataatcatgcctttatcctggagttgctgtaagggttaaattcagcacagaaagggatggaaggggaaggaggaggtccttgggccacccagcttggcagggtgcaataaaagagtcctaggtagagggagccaggcaagattgcaatatctctgtgcctatcagtgttgggtttctttatttgaaaggggagagagggcagactccactctgcaggtagagaaggtggtgtggaatgcgggtatttatttttctttgcctgtgaaagccctgttttcgctcaggctgtgtagggcttcccgacactgccatgggtgcgcacatctgcacactctggggtgcctgccatgcagaggcatctgcccagggtgggcactgagggcatccaccatgtgacgcccccgtgcagcctgtaagctctcatcacagtgcctgggatacctgggagtccccagaaagagtgaggatgggtgagggccatgaaaccagggcatcattcctccacctcctctgatcaggccctcctggtcccattcatctccttatctcctggcagccagtgggttgctgggaaggcaggggcagccttcctgattgacaaacaaaacaagcttgatcacaaaaggagaggggagactggctgggcctctccagctcccctccccgtgccccaggcatctttcttgctccacccaactggcaccctacattctaagatgctgcgagggggctccaaagccattgtcgaaggtcaggccacccaggctaggagccccttgcactggggaggtggattcaaggagtgatggggttgccatgaggcggcgcttgctgcaatggccgcccctccttcccttcagctggctgggcaggcagcttggagaggaagccaggcggcaggtagctgagaaagacatcggatccagggggagcagcagagaaagcaaacaaacagggctttgtgtggctgcagattggcggctcagaagggaagccaggcctgtggtagggggaagggagaggaaggaacgggagaccaggccattgctctgggccagagatcggcggctggaccagcccgggctgggcggccgggaagtagcgagtgccactacgtgtggacaggcatctggagtcacagcctggccgagtcccagctctgccacttcactccttaacagatctgggcttgtttgcccacctaatctgggcagtcattcacacgtaggactcgctggcttaggaggagagtcacctgtcctggcccagtcagtgtctgctctcatcctacccttgtcccgtcattgctggcaggacacagaatcaaagggattcagggtctcctgggagctgctagccttgccgggtctcctgggagggcagcgacttctgcttagatctgtgggcactttggagtctttgaccggggaggcagccgtgctgaggggaaacgggttctctgcccaataacggatgcctggggtgtaggtgggcagaggctggcatcaggcctgaggaaccaaactgccccctcctcgtcgcggtggagacgcacgaggtgcggggaggaacatagccaggaagacgggccttcctgtggggagggaggggcatcttttctggggtgtgagtcacattctggatcccagcgagggcagcccccaacctggcccacctctcagagggctgggagggcccgggcctcgaggaaaggcataggtaggagctgtcaggccagacgcccgggcagctccacgctcgcctccgaggccatttcctttcctctctccccgacctcgagaaggggcggcgagagggcaaatgcccgcgcttcctgccggtcccgcccctccccgcccgcggcgcccaccatcttggccgcgccggagcctcctccgcggtggcgtcccacaggccgcggtcggggcccgcgacgccgacgccgggagggggcccgggaccttcggggcgctgaggccaggcggggggcgaggcggggcgggccgctcgcgtcgccatggcagcgcccggcccggcatgcttcgcggggccgcggggcggggcggggtgctgaggccccgccccctggcggatcccgggtctttttccgggaacgcgggggcttccagtcccagcgttgcggccggcgcttgcgggttaccgggccaggcggcgcgcatctctgggcctcgttctcccactccctggatgtttggggataatgaaagagagtctgtgcgggttagcctcgggacgggctctgcttaccgagcccggcaaccccacggcaggggcctcgggaagccgcttccgagggccaggataatggggagactggacccctaccgcttgggggctattaaaagtggaggccaggcggcctctcagctgcagtctctgggtctcgagctcttccccggaactgtccatgggtcagtgaggacctaccctttgccctagggcaggagaaagaagggggccgggactgcacacctcacccggtccaggcctggaccctgcaacctcggccggcctccctccagcccaggagcacaggcctcccctagttggcagtcgttggactgtctggctgggaggcacattcctacctcctgagctcgggcaccccgcctgccctgggggagcctcttccagaactttgctgccaacactgccctgtccccacccggccttctcgtgccctaagtccctagttactactccacagccgccttctttcccctggtctttctctctctctttttttttttttgagctagagtctccctttgtcgcccaggctgtagtgcagtggcgtaatctccgctcactgcaacctccggttcccaagttcaagcgattctcctgcctcagcctcccgagtagctgagattacaggcacttaccacggctaatttttttgtatttttagtagagacgaggtttcacctcgttggccaggctggttccaaactcctgacctcaagtaatcctcccaccttcgcctccctaagtactgggattgcaggtgtgagccactatgcccggcctcccctagtctcttaagaggcaccgattcagctaccctttgtcacctcctacctgtactgagtaggcagctaaattgaatgtcggcctttgggtctccgaagggaggctgtatgctggttgagaggctgtcctcgcgcctttctccctcctcacccagggcacatgcacaaagaggctgagaatcggctacagttgcagcagaagagactcagggttgccatcggaaagaacttcccagtcctaagcattttgttcttagtgaaattgtcagattattgatatgttggttgtagagatatccaaaaatacaagaaaaaagtaaaaactttataattccaccagcagtatataactactgtcaacatactttctgtagatgtatgataaaccacttatgatacatctacggagtcatgctgtatatttggttttgtaaggcacttggtggttttaatagcttttttctcactataaaaggaggacaggcttattatagacttttggaaaatatgacaaattaaaaaaaaattcacccgtactctcagtctccaaaggcagccacagttgtcttccctcaacccccccaccacccgttcatggggtttttcgctttgtgttttttgtctgtttaggtatgccatcattacttctgtatatagcagttgatattccgcttttcttacttaatgctgtttaagatgctcctgaaccacgttcttgggagaacttccgagatgaggcagacatttctgggggtgatttgttggactggctgttcactttctgagtttgtcctctccctacctgtagccccccgacagagcccttctccattgccagtaaccaatgatatgcagcttgggtcagggggtcctgcttgctgggggcccaggaggctgcctagtgtggacagggacatgcaagactcatggcccgatgctgagatctgggctccaatagtaaggggctttactctggcccagatatgccaggtttcagggaggtctcagaccttggcctcatcctcattcggggcctcctttgcctgggcacactcagacccgaggccccttgtcgatcctgtgacccaccttctgctttgacttcctaggagttggtttctgctgcccttggctcctcagcccctcttctctagcctctctctggaggcatgcaggcttggcaccagcacagcctccctctgcccagctgccccttggccctagctacaagctgcccttgccctgacctatccctactgccaggcctgtctcttctcccctattccagaacggttcaattctaacacatccaagccctgcgtgaaacaggccttgggaaatcacagttgccagggacggtttggcatttaaaaggcatccaaggctttggggaaaaagctgaagagacaagaggatgcagggccctgtatcagaacagcatctggatttactggatggaaaaatcacagaatgcccctttcctcgggaataacagtcctggccgaggggcagcgggtgtggcatgggcacgccatgccctgcctggccaccacctgccatcaccgctgtgtactctcagaaatgaaaagattagggaaaagattagggagggacattgtcagcctgcagccaacggcccgctctaacaggtttattcagttgtaaaatatttaagacctgtttcactttacctgtatccaggaggcagccaggctggggccgagattgatgtgctgaacatgatttatttatctggatttgctcttgtggtctgggtgttacctgggtgtggaatttaaccaaatgacaagatgggtttgcgtgtgttcctgagcttggggattgtgtgtgtgtaaaaagtgagttggggtttgtgtacatggcagggggttgctgttaggtggcttgtgtgtctgtttgtcactgggaccaacgtgtggttgtgtgtgtgtctgatttggggaaatgagctgagggtatgggtgcttacacaccaggcagtatccacagcaggtcacacgttctttgtgtgttgggggcacctctgtgtgtggccgagtagctgtttgtgtgcatgtcctgtggtgtgagacctggatctctctcacccacttttcatcagtggtggggcattgcgcactgactgagttgctggggcatctgcttttccatccggccctgggtgagcactgacaacacctgactgtcttccagtagaactgggccttcctgccctgcagtccagagactagagggagttcggtggtcaaggtggtccaggcccacagccatagccctaatgcaaagcatggctcctactccagtgcgctgctgtggggtgaccctgctcctcctccctggacctcagtttcctcttctgctgcagagggcaggcgcccaggtccctgtggctgctctcacacacgggcttctgggtggctcatggcaggcttagggcattgggctggggtttgtctcctgccactcaagagttgagtcccaccagtactcaagaacagcaaggaatgatgggaaaatccctgctttggggcccaactctggattctgggcgttgtctctgtcccccatctaggcccagccctggcccagtagtcaggaaagcggcagacaaccctgtaacagccctcggtctccccctccccccacacccctttatattgaatgtgtctgtcactactttcctaatgaggctgctgagggcccccctggggcagatacctttgcagaccggaggtgagggggtgggccagcctcagggtcaggacaggaaggggagctgagcccttcccctgcctgcacccccaggccagctcagctgtggaggcattgaggcccctctcagcccctgagccagctgtgagtgggcatgagagcttggggaggtaggaaagctcaccccaggcactgagttttctttggcgctgtgactctgtagtaataatacttccacctggtcgatatctatgtttggaggcctactgtgtgccaggcactgagatcagccatgatctggatggacacacaaaatccctgcccttgagggaggtgtggccaaaggaagaaagacattaatcaaagaatcaagtgatctgagtcgtgcattcatgcatgggaatgccggctgatcacaagccaagacagaggccaggcagagcttctctgatggagacagggagtcctgtgcttagactgggggctgatccaggcactgggtaaaggctcagccgggattgaaggaatcaggagacccagattcttgctgtgtggcctcaggcaactgcccaccttctctgggctcctagaggctggtggcttccttctggctcccgtcacctctgagtggaactcaggcagtatatgtctcctcttcagtgctttttgcgctccctgccagggccctcaagacatctgtcggcaacatccttgactttggaatgctggaggcactgccccaggggacgcctggagccaagcacagcaccgctgcctcaggccccacctgccagttcctctgggcccttttgctctcacagagccacctggatcgaagaaagcctggaaaacattaaattgaagaattagtcccctattttgccccaaaattgcagagaaaagcatttattcatgcattcactcattcatttgcttgactagtgtttcctgaacacctagtaattgctgggcacactgcactccatgttggactgagatggcaaagtggtggtcctcctgccacgtcctgaccacagacctgttttgaaagcccatccattgtcggggggccgggggggggggaatcaaatgaattgccagtgagtaatcgttgagtgacttcatttccaatttccagtttacatttcttctggattattctaccctgcttcccccggccacagttggtggagatggctactgtctgccgggtaggatggcccacccagcccaccagctggtcacggtcccatcccccaccactccaccccaccctgtgcctctcctggtcatgtcacacatgatagtgtggcttcctagttatgagcccagcctcaggagccagactgtcgaggttcaaagctcactgtggcttgtgggaccttgggtgtccccctccaagcctcagattcctcttgtgtaaaatgggatcacaagagcaagtatccactactcctggggctcttggggagattaagtgagaaaatttatgctaaatccttaaaactcacataagccttggctgctatcgttgttgaataaatgaaccacttgcaggctgagaccggggctgtgtgtcacatggcacctctaggcctcagtttcctcagctgcttctttgggaaagcacatctgctctctaggttgggcctcctccctcgtccttcaaagacctattcttggggcctgggccctgtgaaacctctggctctcggacgcagcctggaacccctgagacgaggtcaagctccgcggcccgcctcctgtcgcccggccccaggcgggactgccttggcaggactcgggccgcgagctggaggcgcggctcccggctcggggctccagcggccgcgccccgccgcccctcggcgttcgcgcgcagcccctgcgggggtggccgccatcaaagcgtcttctcgttcttatgctaatgagccccattaaagcttaatggctgcgaacgcgcgggtttaattgcacctgcccgggcctgaggcgcggccggccgcggaagcagctgcgcgccggccgggacggccttaattacctggaaaacgacgcccggcggggaggggaggggatgggagagaagaggagagcagcggggcctccgcgaggccgggcctcgtccgccgaggccgcagtccggcccctctcgtcctcggggcgcggcgcgttcgtttcattaatttatcgccctgcctcggcggagatccgctcgcccgctccccggcgttcaaccgcgccggcttcgtgctcccccgcgccgtcccccggccatcttgggcttggcattcaaggcccttcgggaccgctgctgccactgacccagtgccaccctgctctgcacgaacaataataatggtggttgcacattacgtgccaggcgctcttgagggttgaatgtgacctcgcagagaccccagatgcctcatctcggccttactcccctcgtctttagaagctggtacctctgcctgcaacaaagacccctctccctcctcgctcatcctccctgaaacccacccctgcgcctccaacaagatgagcccctgtcctcctgggatgggattggggatgggtctgggccctttgttgaggggtgggctagcccatggtgaaggttgtctgggtgtgtcctccctctggactgacatttcactgaggccagtctgcctgactgccctatctctgcatgcccctgccatctccctggggatggccctggggttgtgggggctgcactgctgccctgagccttctgcctaggcagggggctgtgagactgatgggaacctcagggaaaccttgagacctaatggtattctctgtgggacttccctgtgctcctccccaccccatcaagtgatcctgggataggcgcctgcccctcctctctccctcattcccttctctcactcttctctttttgcagagggaaggaaaacggaagagggaatagacagaccgctcatgcagtttttagatggtcccctttccctcccctctctcttccatgtccccttgtacccagcccctcttttttctttctttgaagaccgcatcttgctttgttgcccaggctggagtgcagtggtgcgatcatggctcactgtagccctcaacccgtgggctcaaacaaccctcccacctcagcctcccaagtagctgagactacaaggtgtgcaccaccatgcctggttgcccctcctttctgccccttccagtcccatccctcctccctttgtgcgtctcagagaccaaagcctgaagcattgcacagtgcccactgggaggccacccagccctggtcctgcctgtgtcaggcaatgctgagagcacagaggggagtcagacttgggctctgccctccaaggactccagtcggggaggcagcgctcgaaaggaatacttgtcctctaatggaaaaaggaccaatttaaaggaagcagagaacagtctttgagctcaaactgggaaggctgggagaggcttctaagctcagcctggaaggaaggataagtgtgagctaattggcaggaatagcattccaggtagggaaacaattggagttcagccctggctagggcagaacactggctgacatgaggggagagggagtaagggacaaccacagaaaaactgagctcactccaaagtgtggaggcatgaggctggagaggtgggcagagggtcctctgttgcctagcaaccttcactgcctccctattgccaagaggaccaaattcagacccttcagttggcacaaaagcttgtaccacccacctcatcccaggatgcagcctattatcttcagctgggttcctcactaccaggccaagcctcggatgatgattgtgagcctactgtatatgggaaggggggataagcagtgaccccatcagggctaatagcagtggggcctgctgcccaactccatgccccttctcccattcttgtccccagatgtccttgcagacaaaatggaggtgaatgggcaggctgccaggagcgtcaggtggcatcacagccgggtagacagtcgtcactgattaatgaggtggtagaaacctagagggaggtccctactggcatgcctcggggttctgcccttgctctggtcaaggcaaggaatgaggctcacaggggtttagcacctccctgccaggctatgtgaaactcttggtatccagtagtttatcaccagccatgaggtggcttctcttaatatctcattttgcagatgcagacactgaggccagtcggggtgaggagtgagctcaaagtcactcatctccgaggtggcaaaattaagcctcaaacccagggctgtgtgacttcaaagcctgtgtttgtaactgcggagctgtgcggcatcagtaatgcatctgctgctgctgccagacgtgaggaggtggggccctgcctttcaacttcatctctctgacagtggttagcactgtactttacgtgtagtaagtgctcaataaatgcttgtggactggatgattggggcagtaagcagtgagcagggctcagaagcagtggagaggctccatcactcttcctcccaacctgcacctccacccccaggagttggacagcggctgtaaggggacttggagactcaaggcttccaggcagggagtgggctcacaggaggctagggaggatccaacttcctgtccaggtcagggtcaggaggacagccgcgccccctactgccccgctgggaggccaggctgacgtaggaaggctgcactgcaagtcagaatcatcagcaaaacctggggaatagagcgtgtgagggtttccatgcagggtggggactgctttctgatcaagcccctaggccaaaaacctttggaagggactctctgagggcagtgcattcttgtagcgtcgggagcaggagttctcccataacctttttggggtggggacccacctgtggctctggaaaggtgttggctccggctctggggctcagggggagggggccattggtgggcaaaacaagcatagtgaaaactgaggctcatagaggttaaggtcacagagcagagctgggtctgttttctttttgtttctgttttagttgcaacaggggcttgctctgtttgccgaggctggagtgcagtggtatgatcataaatcactgtagcctcgatctcctgagctcaaacgatccttccgccttggcctcccaaagtgctaagattacaggcatgagccttcatgcctagctgggactgttttcaaactccaccaaccccttttcttttgttccattccactctgcccagaaccttcgtctggcttcccagagggcccaagtccttgtcttcagaggtcctggctggggagccttagagcatggtcttccctcactccaggcttctcgggtctccctattggggactgaccgtgggagcagtgagccactgtgcaccagggcagcccggctcctcggggggtggcccaagcagtcagggcggcaggcttgatgggccagggcctggggactctgccatggtggaccattgtgcccttgcctggcttgccaggaaagtggagtgcgtgtgctcacccttgcttctgaggggccttcctgaggcagaggctgtccctggacacccagtgctgttgaggcagctggggacactcagaccatggtggacaaagacttgaagtctcgtttcagccctgcacaaggtgtgaccttggctccagcactgctccctctgggcctgtctctttctcagcagaatctgggactggccacatcatctccaggggttctagcattggacgcctgaaagtggacaacatggcagtgtgagggggctctttgtggtggggtggtcagaatggccctccatgtggggggctctttgtctccccagggcagtccttaaccaccagccagcctccccaggcacccgtgccgggcagtggggtgtgtaaaggcctggcacacacagacaggagttccgatctcaactccatcctcatgagctctgtgaccttggtgagtcccttttctgtgtagcctttaactctcatctggaacgcaggatatgcatagtcctgacatcaggacgttaccatgagtagtaagtgaaactcccacttcaggtccttcgcctggtgtccagggcatgggaggagctaatacgtggcctctgctgcttgtgttgttattggtggtggtgtttgagatgtccttagagatgttggccaaagtttccagttccccaccctcccaagcccgtggggaaattgtgcttcctggtggtttttgggtgggggggccgggggagggtcatgtgaccagttatggcccgtgaggtgtgagcagaagtgacatgtcccttctaggccagagcctttcatggccatgaggatccacagaactcactttcctctggtagaccaaagtcaaggtggcaactgctcagtgagagggagcctccctgctaccccagtggatggtagtgtgaaggataaaccaacttttgttgttgtgagcccttgagatttgagagttttgttacagcaacatggctagcacatcctgactgattcttcatcatcatcatcatcatcactcaagcctgtcccccggccaggggtccatccaggagaacaacagccatggaggagacccgtcaaaaaatagaactttattaccaatctgtttctataattgtttgactcattttctcactcatttgtttgctttatcaccaatttctttacatcatttattccttcaaaaacatttcttggctgggtgcagtgggtcacgcctgtaatccgagcactctgggagcccaaggcaggcagatcacctgaggtcaggagtttgagaccagcctggccatcatatagtgaaaccccatctctactaaaaaatacaaaaattcggtgagctgagatcgtgccattgcactccagcctgggcaacaagaacgaaactccgtctcaaaaaacaaaaacaaaaacaaaaacaaaaacgagccaggtgtggtagcacacacttgcagtcccagctacttgcaaggctgaggcaggagaatcgcttatacccagcgggcagaggttgcagtgagctgagatcgcaccactctactctggcctgggcgacagtgcaagactccctctctcaaaaaacaaacaaaaaggctgggcacggtggctcacgcctgtaatcccagcactttgagaggccgaggtgggcagatcacgaggtcaagagatggagaccatcctggccaacatggtgaaaccccctctctactaaaaatacaaaaattagctgggcatggtggcgcgtgcctgtagtcccagctactcgggaggctgaggcaggagaatctcctgaatccgggaggcagaagttgcagtgagttgagatcgcaccactgcactccagcctggcaacagagcgagactctgtctcaaaaaaaaaaaaaaaaaaaaaaaaaggcaacaaaaaccaaacgccacttgaccacctgtttcataggccctgaggtagcgcacaggccagcagggagctatggatcattctgcagagccacggtgcttgcccagaggtcagcagccctatgggatgcttggggtggggcgtcagatttgcagagctggggcgagggaaggaatggcacttgggggagtgggtctgctggagaaaggcctacaggtaacaggaagcactaggcagttgggtccggccagcagggatgggaccgtgtagtggccaagctggagggggactttggtccctgggtcatggggtgtgcagtgctctgcactgaatgatgagagggcatgcataggtgaaacaagaggccagctgctgaagggaggaagaccaggtaggcagctgggccaaggatccaggtggacaagggctggcatgggtctgaagaggaagagcagggccagggaaagcccagggctggatggccagtggttgtgagctgcaccagcagccagagggagccggggactggatgggggtggccctgtgcagtgacggggaaagtttgagggatcagagtagagttggggcacccgagcggcatccaggggagatgtccaggatgtagggtggtgaatggacaggacattgaagtgagaatcacccctcctgcccatagacaaaccattggtttgagggtggggcctgccctgggagccgggaagcacacatttcttctctgtgtgggctcaggggaaaaaaagaattgaaactcccacaggggaaaagtttttaaagattccaccattggaatgctggtcttgtgtaacaggaatgttttaatccatgcatttgaaacacagttattgagatcctactgtgagctgggctctgccctaggtgcccatgggtgagcagacagacagcgatctctgccctggtgagctccttcctgtcttagtgggagacaggcagctaatgacgagcaatctggggcatgctccttagtcctaagctactcaggaggctgaggcaggcagatcgcttgagttcaggagttcgaggccagcctgggctacatagcagaaccccgcctctacaaaaaatacataaattagctgggcatggtggtgtgtacctgtattctcagctactcaggaggctgaggtgggaagatcgcttgagccccggagtttgaatccagcctgggtaacatagcaagaccttgtctctgaaaataactaaatacttttaaaaagaagatagatgtagtgagaaaaaaaagtaggtggggaaggggctcagggatgggggagatgcgtgcagttttaaattggagtgccaggaaaggcctccctgagaaggtgacaggtgagcaaagactcgagggaggtcagtgaaccttgcaatgtcaaagggaagggcattgcaggcagagggaatagcagtgcaaaggtcctgaggcaggaacgtgtttccatgttgcaagaacagcaggggagccactgtggctggaggggactgagagaggggagagggttcctggaagactgtttgtttatttgagacagggtctcactctgtcacccaggttggagtgcagtggcatgatctcagctcactgcaacctccacctcccaggctctagtggtcctcccacctcagcctcctgagtagctgggaccacagatgcgtgccaccatgccctactaattttttgtatttttggtagagacgggtttttgccatgttgcccaggctggtctcaaactcctaagctcaggcaatccacctgcctcagcttcccaaagtgctgggatcataggtgtgagccaccgtgcaggccagactctagctttcattctgagtgagctggagactgcaagaggcaggctccaagctgacttactatctcacaggctccctcaggagttgagggggccagacagagcttgaaggggagtagaaggctcctggaggctctggcagacctcagaagctgcagccacatcgaccaagctgaccccacccaccatctccaaggaatgggttaatgggcaccccaggcctctcaggtctctgcctctgccttgctcctcctccttcctcctgctgccaccctctgatggtgcttcagcctgtgccatttttctgggtcctctccaagtgtatattgaccctgaggtggcagcaggaggggaggcaggccccctccccaggaggagacccccttgatgaactctgagaagctggttgcttagcaagcccttttttctccaacaatacttgtgctaatcagcctagattgaatgagcaaggaattggcttttgcaccttcctgtcctctcttctcatatatatatatacacacacacacacacatatatatatatgtacatttttttcccttagagacagagtctcactatgttgcccaatctggattcaaagtcctaggctcaagcaatcctcctaccttagcttcctgagtagctggaactacaggtgtgtgctagagtgcctggctagggactccattctagaatcatggaatcttaggggtcccctgggttgcatcttgactcagtgagtgagtgggttactttttcacatccctccttgtacacctcctgtgactcctggcagctcactctctttctagcgactgagggcctctggacaaggtgagggggacagagcaatggtccagaagttagaagactgtggtcccagtcacaggctgggcaccataagtggacaccataactgacccatcctccttttgtgctcaaatgctgcagttcatccggaaacaaccaaaacattccagcttcacagctgccagggtttggagttgaaccctgtgtcccgtgctcctgccacccctgctccaggcacaaagggaacagttcgtcagtccaccacgggcctttcctatcctcagttgcagagtgggccaggacatgccgctttacagatgggaagactgaggcccagagagtggaagggaaggagaggagcccattccaggctcccggcctgggatttttcccatatgctccagcagccacccggggaccatcattatgacaatgatgactgatggagggcctagtgtgccgggcactgtgctgagagaccccaaggagggcgtagcatctgtgtccacaggaggaggctgtgaggctgagagtacctagggagagcagagctggagctggctgggctctggccatgcggctttgctgtttgctgtctgctgtttgccgtatcaaggggcgatactcaggcgggctcctctcagtctctcttctttggtctcacctctactcagaaaagccctttgctggcccccaaatactcctaccccgactctcttctccacccctccaggctcccaaggcccctgcctgcctcggcctccctgctgggttgaccacagtcagtcctggctggaagctgaccctctccacagctgccccaaaatacatgtcacagtggggcatttgcagttccagcctgggcagctgcccactaggtctctttccttcccttccctgggtctgcccccaggcccctggcctcattctggtcctgagctcccttctctgggccaaggagctgctgggcctcggggagggggaaccccagcactaggtccaaagtgatgtagcagggccactgtctgtgccggggcctggagctttcctctgaaccttaaggggcccccagatcagctccgtgcgggcctggggtgcagcttccagaatcttggaaacctgtttttcatggagccagatagaatgagcacccaggaggaggcagttccaagagctggtgcttcaggaggaaacctgcacagcagacaggcgtgcgcacattcctagatgctagccctgtggcggcgcacctcacgctcattcacagtacacggacatgctcacctgcccaccatgggtggtcaacccttggacacccacactcttctcacaccctcacacacacactctgcaccactcgcctagccccggccacgctcatgtcaggattctgaagacctcgagcacacacagacacgcacctggtcacgtgcactttcacacatacacttggcaccagggtggcagcagcggaggtgactgagaagcctgcttttcacagagaatcagaacccagcgggggctttagccacaaaaaaagagcatttcaaggagaagggctgcctgcatgccaagcacacgcccctcacctacccaggaccccttgtgggagctgagccccatggagaccccggggtacccatcccaccctccaacatccatccctacgtggatatacggccacagttgcagctgcggccatgaggaggggtttttgctcctttttagcagtgctccatcccccaccccagagtacagggggctgcccagagaccctcctggccctgggggcctgtgagtcagaggctgccagtggtggcctttcggctgttgctggggaaatggcagcacagtggccaccaagactaggactccctggggaggccctgctggccctggcactggtggcttggcctcacccagccccacctggcagatgtgccccttgtggctacccaaggactggccccctcctcatttcagaggtggagaaactgaggtaaaaaagtggagacagccagggcacccctcccacaaggccctgcctcatttgagacagagccctctgggaagcctgtgcattctgtaggtggggacctttggggccattttttccagaggcccagagagggccgtcttcttgcccaaggtcacacagcaagttcatggcataagctagccagcctcgtactccagagctctcctgagggcccccatgtgtctgtgcgggggtgttgatggggggcaggtgggagggaggaggtaaggctgatttgtttcccagcctcctccccctcccctgctcccttctctccctcacacggtttgtttggagaatgactcacaggaatgcagcaaaatcctgatggatgggaaggcagggccgcagtacccggaaaacctctccagggtagggaggcggggctgagccttggggcctgagaggctggtgataggggagccctgcatgcaggtggggcgactgaggccctggaagaactctggtcacgtcctggctgggggttgtccctcctcgacagaaacacacaggccctggctgccgcagcacccctggagcacccgtcccccatgatttccatctttgtgtccccgaggcatctggtgcactgtagctgacaaacacatgcattttggcactgagtgtgacccaagtcagaccctcctgtgtgtgccctgtcccccaggtcctcccagctccccggagttggggggcgggtgcttgccattcagtcctttcagaggcagccaagggcctacggcatgctggacactgccaggggctggggaggctgggatggagctggagggaagtgggaggtgtacacgggatggacacctcctgtgtatgttccaaatgtgctggaggcctcaacaggtcttggtacaaggtgaggcaaaccttagaggacctaggatgaagtttcacgtaaaggaacagtggctgtaagggctcccagaaagtgtagggaccctgggaaggtcccagtctttgaataaaggtgggtgggaccttattggtagcttggggcattagggcccagatatcaggcagcagcatgaggtgaggcccgggctctgtcccagggcaagccctcctcctgcgcaccacatctggggcctccgaggagggacaaagcattcaactcccgggacctgtgggtgggaatgtccccaggcccagccctttagtgcctgctgatggctgtcacgcggtgtccggccctgatgaccagatatgtgttttcaagagaagctggaatttggatttttatgtgaactctcctgattctcaaatgctggctccgttaacaaaaggcacagtgtggtttaaaccacacatgtccgcaggcagaggaccaccagtttctaatgtctgcgctgtggggcgcttgggtttttgcatttggttcttttacattccttattttattggaaacagcccaaatagtcactgagctgcaactctgtgctaggtgccggggctctatcagcgaataaaacaacatgtgacggagctgccattttagtgggagaagacagtgaataaacatatatcaggtgatatgtgttaggaagcaaatggaagcagggctccagaacagagagcggctgcaaggccaagcccacatttgggtggaaggggcagctagtgcaaaggccctgaggtggggctatgctaggtgtgttagaggcctgtgtggctgcagcgggagtgggtggggaagtgggaggaggtgaggtcagaaggtagcataggtcaaatggcataggagactgtgggctgtggtataagcttggttttaagtcttatgtgaggtgggagccatggaggattcctagggagggagggtcaggatcagacttggtttaacaggctctgtctgggtgttgtaatggctgagtggggcaaggatgggcctaggaggcccagaaggggctattgcacttgtctggctgagtgatgatgcggcctgaacaggaagggggtagtcaccagagggtgacctgaggaaactgtggtcaagcctctccatggtgtaaacagtaaacacgatactgattctaaggacttggtagtaacatggaaatggtgactgtgtataatgctatgtgaaaataggattagaaaattgtacattaaaaacacaccagcccagatgcaaaaggctgcagatcatatgattccattcatacgaaatgcccaggacaggcgaatccagagagacagacaggaggtgagcaattgccaggggctgggggtggggaaatggggggtgactgcctatgggaacaggtttctttttgggagggggatgaaaatgttctgaaattaggtagcagtgatagttgcacaacttcatgaatataccaaaaccctgagttgtcccctttaaaagggtgaattttatagtgagtgaattatacctcaaaaaaaaaattttttttaaggcatgtccagatttctaaccaaaattggatgcacatagaaaacattgcaaggagctgggcgtgatggtgcctgtggtccccactgcttgggaggccaaggcaggtgaatcacctaagcccaggagttcaagactagagcctgggtgatatagtgagatcctgtctctaaataataataataggccagctgcagtggctcatgcctgtaatcccagtactttgggaggccgaggtgcacggatcacctgaggtcaggggttcgagaccagcctggccaacatggtaaaaccccatctctactgaaaatacaaaaatttagctgggcgtggtgatacacgcctgtagtcccagctactcaagaggctgaggcaggagaatcgcttgaacccaggaggtggaggttgcagtgagccaagatcttgctactgtactgcagcctgggcaacgagagcaaaactccatctcaaaaaataaataaataataaaattttaaaaagattgtaaggaaatattcacagtaattgtcatagggtgaaggggattctggattttgtttgttttctgtgtacttttcaatttttaaaacttaaaagtaggcatttctctctaaaatcataaagactttgtgactagggccagagatgggggatccacttggaggggctcagcctctctctccagctcttgtggatccattcagctgcatggctttcacttgggaggttgggagcaggagcttgctctggtccgcgtctctgaccttctggaattccattcctgctcacatggccttggtcaagtcacaggaccagagatcccagcggccctcccctggagagtgtcccagccgcccacgatgcctccacccagaggctgccctgttctgcttgcatgccttcagccgcaggttgctcaccacctcccgagcagctccctccttccatttctgggcagccctgcctgctagcaagctcttccttatatggaggtgaaatctgtcttcctgttgcttcctcagctccctctctgaaccccagtttctgggtctgcagaagggggctcccaggcctctccctgcctaccttggccactgggaggttctgaagagactggaggaccagcagcccagagcctgtgtcggtggtcattcagctctcgggacaaagcgtgggtgggcctgtgccctggtggcataaccaagtaggatttccacattcagtgtctaggccatcgctgtgaaattggaatttgatactaatcctggagattgaaaactcaaacctctccataggccaggagggaatgataatcatcagtgctaacatttacggagggcttgtggcgtggccaactctgagtgacgtttatgcactcatttctatttatcaccagcaaatcccgggccctgctgttcttccccattttaaaggtgaaaaacctgaggctcagaaacgtaacgggaagcagctgggtgcgagcctcctggcacacattgtgggagtgctgtgggtcgaataaggaagctgagcagcaggcagcctctcccctgcagaagggcacagaagcaggactggaaggaaatcctggttgtgggctgagctcgggccatccacttgtcgtggtgggtgaagggtctggtccgcaggtctgctctccaagctgcctcgttgcaggtgctgactttgggaggattctccttgtctcggcctaggagctttcttgctcagcttggggagagaggtagtaatgtcgccttccacctcatggacttcccagtttagaatgctgcttcccatcccacccacatcaccctctgttaggtaagcaggagcagaaatgcagtccttcatctcagctctggaaacgggttcagagagggtgtagaactgcccaggggcacacagccaggacaggcccaagccaggaattgcactgggggtgagcaggggatggctttcctggcttaaggtatgtgggaggccaagagccatcatttttcccaatcctctcctggagagccaggggacatctgaagccaggggctctgcctgtttcctctgcactgtccctgtgctgggctgctctgagctgggcactggtgtggaaggtaaataagcagccccatgacaagctgtgagaccgggcagtggtttgggctccacccaggcccatgcctctctcttctgcttgcagagcctcagtgtctgcatctctcaaatgggctaaggacactcacctcagaggatggctgagaggattccatgtggggtgcttggcagagttagctccagctctgcatgccaccccctcccatggtgcagccacctgggttccaccagggcattctgggatgacaccagaccgggaggagaagtgcgaggagtggtgtggtcattggcgtctttcctctgcctctgcctcccccggccccttccattcacatggtagaaattcagatagcacagcagcaagtgtccctcccgctcctgaccttccagcagtttcttctccatccttccaggagtgatctccacagattcagatgccccccggaaagggctttccattcaaagtttcccctggactcattctggccccagagaggctgtgcccgatccgatcctcgcccctttgcgggtgtgaacttggaggctgtgagagggccaagttgcccctgggaatcgtacatattctgttccacatcctcctcctgttgtccgttccgtgccctcctatgtcaggagtggaggagtgctggaaggctgtgcaacacactgttacccattttgcagatgacaaactatggcggggggaatgggtttcccttagcagagagggaattgtccaagtcatgccaaagacttaagggcatgtcatagccagcttgagtccaggcaggagctgtagccaccagtcgggacaaagtcaggggacttgagaggtcttcacccagctgcggccaggagaaggcctggaaggagcatccctgctgccatcaagtccagggagggcagaagcccatggagctctgagctgagttgggaagtggctggaggggtcacttgtggggtggttaagccacccagagatacccatgagccctggggccagggaacaaaagatgtgtgaaggcaggtgactgacacttgggtgtgtgtggacttctacatagagaaatctccgtgttcttgcatgtgcatgtgtcatttatatgtatacatgtgtatatgtgtatacatctctgcatgtagctgtgtgtgtatgtctatatgattgcatgagtgtgtgtacacacagatgtatatgcccatgtttctggatgtgtgtgcccagcctgagggggggacagggttctgtacgtgtgtgtgtacacgtgtctgtgtgcatgtgtatgtggttttgtgtcttttcatgtgtgtggtgcctgtgtgtctgagtgcacattgtatggagggtctgggggctgcgtatgaggtaactgtgtgattctgtctgactctgggtgtgttttgtgttgggtgtgtctacgtgtgtgtctggcccacatgtgtctggcccacatatgctggcccagggcaggatggaggggcctcctgtgtggtgctgctggactctgttgtggtcaccacggccccgtgggcttagcgtggggcactggtggggctgatgttgccacttaacctcagggtgggatggcatggagcaggcccatcccgatgtccctgggtggcctggtggaatgtgcccacgggatgcccaccactgggggaccccaccagcgttggggctgaggcttaggctgtagcaggctaagaggtccgtctatagcagtggctagatgtctgtggctggggcctgtgcctgaggtcagaagtccatttgtggaagaggctgggagtcagtctgttgctgggattggggagggatcacagggaccagggtcaagagtcagaatgtggctgctgccatggctaagggtcagtctgtggctgcagttgcagatcagtctgtatggcacagaagacaggttaggcctcagccacaccactgtccccagccccttggtggcttcctggcccaggggtaagtttgagccctgggaacaaggggcagagagaagaaagcgcctgtgagtcctgctaccaagcaggcctgggcccagctgttcccatggccatggcagagaaccccagccagcccaacgtgtccagagtgtgtggcttcattgtagccaggaaccaagggtgcccaggaccgtgccagggtgagcagggcagtgcttcccaagtgagactgagagaagacccctgcctgcctctcagtgcatttcctcaggcaccctctggtgcctaaccctgtggctctataaccctccttctctcttctcctacccttctttcccctctcctttatctgctgtcatcctccccactccccaatctgtcttcctttgcagctgccctgtcctctctttcccccagccagcctcctgccccccacctgggccctctgaaccccagggccttgcctcttttaagttcagcagatttgacttcactcagacgctggcgctgaggaaggaagatgaatacccatagtctggatgccccaggagaaggaggctgcatggaggcccagtcacacgcctgcaggcgggggccgtcttcctggagcccatgtccagtgaagggtccacagcaggggtcaaggggggcttagactcggattctgccctgtttgagcctgaagctgcactgacctcatgggatggcctcctgcagtcaagtagggaaggatggacagacacacagatgacagggaaaactacagacagaaaagatcaaaggtcgttcagatcaaaagcaggcagaagacgcctcggtcttggcccagcaccagcattcctgtgcagaccccagcccagggcagagactgagatgtactccctctcccctctccccctgcttcccctggtcgggaggtggccaccaaggcaagccttctgccgtcactccagccagaacctgcatgggtcggggtgggtgggccagattagcctccatcctggaatcaggggagttgggacactgaggggacattcaaatgtttggaacatttgaaaatgttccaaaaatgtaagagaacttggatctctgtactcccgatgctctccacccccatcagctaaaatatcaagctctttgctttcaaagaaaagcattttctcgagtgttttgctctcagtttcacatggtagccccagcttgctcaggaagtgcttggcgttagagggttttgatggggagaaaagggaacagggctgtagttgttgaaggaccatgccagccccatgtgggcagggatgcctgttctgttccctgctgtcccacagtgccctgaacaacgcctggaacatggtgggttccataaacgtataccaaaggagatatgtgtgggcagttggtctgggagacaaaaccggatccatgggggcaggagggctggcagctgcagacctggatcaacatgctcataaaaaggggatattaaggctgggaaactgggaaggtgactggggtagatgaccccctgctgactcagacagggcacagctcctggtacagtcattaaaaatggggcctcttcagcagttttctaagctaccacattggcatgaagggcattaatgtgttggagcaggtacagtggaggctgaggaggggcagggttccttcctgaggcatttgctctcccaccagccccactagcatgaatggcagatcccagcagccgtatccatccttcttgcaagttgctcaggcaagatacatcagtgaatcctgctaaccctgccttcataataaatccaaaatccgaccccttctcatcggccccaccctggccaggcctcatcattgcccacctggactagtgtaggatgcaggcttctgtgctcctgccctggccccacatctgccctcttcacagggagaaactctgaccacccaagggaaagcgtgtcccatccctgctcaaaacactgcagaaatgcctcatctcgttcagtctaagagccaaagtccctacaatggtgtgtgtgcaagcccctgtaggtgtggccccccgtcctctctgcccacatctctttctgctcactcccctcaagccacactaacctcttggccattcctcaaaaatcccagcctggctgctgcctcagggtctttgcacttgttcttccttctgcctgcacagctttgcccccagacagctgcatgcctcactacctttgtctgtcaagtgtgttctcaaatgctcttaagtatgagctctgaccactcagtgtagaaaaacagcccctgcagatgctcccagcccgcttccttggctttatttatttttccatagcacgcttcacctaaggtaacatactacatcatttacttattcattctgtttcttgtctgtcaagactagaatgaaagctttgtctcattccttgctctgaatcctcaacacatagaatggagcctggcatctagtaggtgctcagtaaatatgtaccaagccaatggatgcatacttttgccaccttcaagttacgtgactgggagcaagtgcatttcctggacctcagtgatccagtctctcaaatgaggctgactgatggggcggggggagatacatagagatttgaagttgctgccccactactcaataaacatgtggaatagatgttaaaacctggcccacatctgacctcaggcctgcaggcttccagcgtgaggcttaccagaccagggctgagcttgaatgcgacttctgggtcttagtgtaccagcctggcctgatgggcctccccgtcccttgtttccacctgggtgtccctggtggcctgtcagtgagccttgtccttggctggctccactgcctgcattccctaggaccctgcttagagtccccagccctctacccaccctgcctctctggtcaacagctcctgtttactatttagctctggaatggcatctggacacacacttgcatgaaagcagctattgagatagtgcttggcaaacaaaagggctgacatgtccagacctaggttctccagaacacagcctcacctcaccaggaaggactgggccctttaaaacctgtgagcacccctaccatcccagcgaggagggaggatcctaattcccctggggcagactcttggtgaaaggtgaaatcagaacctagggagcaggaagcctgccagccaggcagcctcctctgctggtgttccagcaacatttgtgggtgctgggtgctggttgctggcaccatgatcccatggaatcctgccagtagggtctgatggagtaagcaaggctttggggtccatgcacacttaggtttgaattgtgaggttgccactccattctgctgcactgccacacgccatgcactgtgcttggtggaggtgagcaaagaatcttgaaattgagagtcggatgggatccgattgtgttgctgtggtcttggcaagttctttgcaggctctcagcctgggtttctcctctaggggatggtcagatcctgaccttggggtactgtcttgtgactctccatgataccacttgtggaagggccctggccaggtcagggtttccatcaccctctggcagatgtgaatggcagccctgctgaatcaagatccctccgtaccactgccccaggagctccagggagtccccagggagccagggaacaagagaggcccctggaacaaatgacaggctctgcccttttttgagataagccacccaccaccatcccatccctctacacccatccccagaatctggaatctgtgaagggtactcactgagcgacctggaatctgtgaagggtactcactgagcgacctggaatctgtgaagggtactcactgagcgacctcaggtgagtcttccgacatgtcctggccctgatgttctccatgctccaccccacccccattttatccaggggaactgttggctcaaagaagagaaaacttgggcttggtcaggcttatgggaggagggcttggtttaacttcattgttccatgcattcactcactcattcattgaacaagtgcttatggaatgtataccaggaaccattccaaatacggaagatacaccaaggaacaaacagacaaaaatacctaccagatacctaaatatgtaaattacatggtatattagaaggtagggaacagcattccaggcagatggatcaacaagtgcaaaggtcctaaggtgagagtgtgcctgctgaattcaggaactgcaaggggcaatgtgagtggggcaacaggctgggactgagggcaggagttggtggggacctgattgtgtgggctgtcatcaaccacctgggggactttctcctcctcatcactcagaaactgaggaggggagggaagacattccagccaggttggtgatccccagcgggcatttgggcttttccgttgccaccttaatggtatacacaatgcgcatctcctggttcactcagcagcctcaggactgagtgaccctggtccccaagacagatattgaagacagagactaagcagtctgacattttaaatatggggagccccgagtggggcggggctgcccaggaccttagggattcacttctggtagggagggctgctaccaggcttcagggaatgccagaaaaaaggtgcccgaggcccacctggcatgtaatgatgggcaggattggctgtaggatgtatagagactttagtatgggcagggttgggggttagtaggtggagaagggagattgggacatcattgagcagcaaaacccaagtgtgacaggtggtcggtgtgctcctgccagagcagaggggcctgagtaggaggaagtggaggtggaggccgaggagaatgagacagacagactcactggccagcgggagaaagtggtgggacgagccagggctgacacatctgtgtgatccctggtgcagtaactccggtagatggatggacacgtggatggatagaaaggtgggtggatgcagcgacggatggatggatgaatgaatgaatgaatgcatgcgtgggcggtgagcggccgggagaggggcgggccagctgagcgctcaatcacagccccggggctcggcgcccgccagctgcactcagaacccccctcaccgtggccctgccctgtggcgcctaattacgtgcccccagggctctggagcggctgctgggactgcagcgaagaggggcccgcgccacctccgccaggctccacgcgccggccttgagtgcgctcccctcggccgccgggaaacctagaggcgcggtttggccccaaggtccccggtcccgctcttctttgtctcggcctagttctcggctgtctccgggccgcgacccacctctcctggcggtccttgccgcatgcttctgtgctgcgccagaatcatcgagtctcagttctcgctgccttcccggccagtaggcgtctcccccagctggggagggtcccccaaaccctgtgcttctaggaccgcggggccggcaagcggcaggatctccaagctgcgtctctgatgcggctaggggaggcgcgcgatgaaggcccccctcttctccgccttctctctacgccccaccgctactacacgtcgcgctgcgccgcgaccccggcgctgcctgttggcgccttaagcggctcttctgccgcggtgcgatccccgacgccaggaggactaacccccacccgccaggcctcagaccccacgcagatccagccacacacgcaaccgcctgcagatacccaccacagccctttaagttaacccaaagccccgtacaggcgcactgcccctacatgcgcagccccacggccccacacacccaccagcccactcgcaaacaggcccacatggccacacaactgccctctggacactcagccccacgcaggcacaatcccatatacacacaaccgcacacaggcgcaatcccacccacgcagtacctcacggagtcacacaacccccctataaacaatcgcacagacacagccccacgcagcgccacatcattcagtcaaactgagacccagaaacacattcactagcttgtatccagacccccccccccaagccccgtgacattcactcgtaggacagaccagaaatatacagccacattgatacacacacggacctaaacgcacagccaagacctcacccgcaggctcgtaagtcactggaaaaatattaaagcgttccctccctcccctcctctatctttgacatacacacgcctgcgcgcgcgcgcactcttacactcacaccccccgtccctaagcgcgtcggagcctcgcagcgggtgaccccgaggccccgcggtgagagccaagggagcgtctccccggcgccccctcctcccgctcccttcccgagctcatctctcgcccccccgcccgcctcctccttccctgccccctcctcctcctcccttcccccgagtctggggcgcgggctgcgcgcagccaagccccctcatcgcgcgcccctccccgcgcgcgccccgcgccagcatcgcgcttaccgagtggatgcggccacggggccgtctctaattacctcctgacccccggcggcctgtgaataatggctactgagggcgctcgcaggggctgctaagaaggaaacgcggggcgcgagaggcgcggcgcgcgcgggagcgcgagggaaaggagcgagcctggggccgttgcaagcggctggcgagagaaaggattcgtgcgagcgctcacatttgtttctcccaaggatctcatctggccaccgcgttctggaagaggcgagagggagagcgtgcgcgagaggagagagacggcgggggaaagggagacggcgagacgcgcagcgccggcgcccgggagacccaggaggagcccgcaggtattgttggcggcggagctttgtgttttcggcgggctgctgtgggcgccagggctccccgagcccccggcccgccgccgcgcgcagacctgcccggagtccggggctgcaggctggggtcgccgcccgccgcggacacccctcccgcggcgccaggatcttggctggagttgcggatttgcatgtttgggggttttccacgctggttgagggaatcggtctcagaagaaggaatttctttctttcctttttttttttttttttttggccgcttttggccacagtttggttgtgctggggattcccccctcccctttcctccacaaagcattggtgagcggtcttgacgaatgtggtattggcggaaggcatggggctgagatggcggggctggtggccacggatggggaggcgagagatgccagagaaggaaggagttctgttcaagttcgcaatctgcgccccgaagctggtcggaccggggagggcgatccgcgcgtccgatcctgctccgggcaaccgatgggaaacttcccgagagcgcggcctccctggggactcggcgcccctgacgcctccaggcgcttcctcgggccgctgcggcccctcctcgccgcccgccagcgcttaaggtcgcgctctccccacccccgccttcctcccttcctcggcggcttccggatctggacagagctgcaggagtggcttcaaacacttcccctggagacccctccccactccccgcacgagagcctgcccagtggcccccctgccctgcgccccagtctcacgcgcggtcgagtggccaggctgacaatgaaatctcgcacctctgccggggggagtggggtggggaggaggtccctcctggggctgctgaccctgggcctcgggcagggggagggggctcctgggggaggggcttgttttggttagagacgtcgacctgggatggcgccggggcagggagggggctggggggtgggcgcggcgaaggcggcaggcttgggttcgcggccgggggtcgtggatggcagcccctcttgggcttggtgattggctggtgacttcaggcacgtcgagggcccctccaacctcagcctcctcccctctggtacaatgcgggctgaaagaggtgatcccgagggtgctgtgcttgtgtgacgaagtgtttgtctcctgcgatcctcagcagacgctgctccggtgacccggagatccggacgcctcgacccctccctcagggccgggaggagaggaggatgaagggggaggagagtggtgggaacttctcctttcccattgaggccatgggaagggaatgctagcccagaaaatttctggggaccgcagttctgaggcggggactcaatccaaggggggaccaccgggtcagaggcttcccggcacgcagaagcccccagattattttgctccatcgggggatgcagaggaaggggagaggtggaagagcgaagggctagctggactggcgttgcgggggtggagagcccgtggaaatcagccttaattggattcccaggcaagcagccaggctatcaaggtgccccctcccctttttcttcctggggtagagagccaggtccagagacaccaagctggcaacccaggcaggtgaaggcaattcctctccctacttaaaaagagaattcctgggggagaggggaggcaccttttgagagggaggggggcggctagactgtgttcaggctgttctgtctcttggtccaggaatagaaagagttaaccctcccccagaaatttgtcagcccccacacagcagggaaacattgttggaccctctgacatgctaacagtgtgacaccggctgactggagctagcagattctagaccctggactcccccttcaaagcccaacaggactcggctgggtggtgccttgttcagggaccttgtgggaggcggaaatgagagcccagagagggtcaggcagcaaagcagtggccttgtggcccggagggaagaggggttacaagccagggccatcggaaactggaagggaagtcgccatgggtctggggtagagggaagggagaggcccttctaccctttgcccagactcctgagcaaggctttgccctgctccccacccttcccacacacccactcagctgcaggcctggccattaaatgtgggtgtctgacccataggttggaccatgagaccctagtggctgagggaggcctgggtgaggctctgggaggcaggactgaaaccagcaagggattcactgctgctcatgccctatggcacaacccccttatttatggggctgccttcccttccccagacctcgagtttccgttttcaagaacctttttcttcctatcttccttagggcccccagggcctagcacacagcagtcactcacagtgtcctgtatttgtccagctaaatggagtgaatgaatcagtggtgaatgaatgaaaagggaaagtttctcaattggaagcatctagcccttgtggttttttttaaacctttttgaaatatatattgtaaaatagcattcacagaaaagctgaaaaaaaaagagaaaaataaggttattgacagtcttagagggctctgacaatgttagtattttgatgtagttcttcccagtccttttcgactcggtggttggtttgttttttaaagactttgtcgtcattctctatattcagatgtatatcctgcttgctttgccggcataatgtgagccttttcctgttttgtaaccaatgcttcataaacaccatggttaatgtcttcaggcttttccaatcaagtggatgtaccataatttacttaatattccccttttgtccaacattctggatgttcctgatgaatgatgtagtggatatattttgtatagcttttcttgatacttaaaatgatttgctcaaaatgccactgctgatgccgaaggctccgactgcctgcagtgggagaaacggcttctctagttttccttggataaatgggacactatttttccttccccacaatctagaaccttccatcagagccgaaaagagccttggcaatgaatcacctatctgacctccctcctttgacagaagaggaagccagagcccagagaggggaagcgagtcccaaggtcacacagcagttgctgggctatgcagcagcgaagacccagctactgatttgccatgttggttttcgcatctgaaaagattcctgaggtctttaaggctgaccctgcccatttcacagatggggggactgagaccccaagcttacccctggtgccgccagctggagccccagacaggcttctcggccctcctgggccacccccgactgggtgtgttcacgggatctggcggctacaggctccctgttgcccgccccacctgcccaccacagttccccttcctctttgccatcccattctccagacaaaaagctgaggatccaaagcagatgcagtgagggggtgggactgtaggtctctggggaccctagtggttgcgtccttgccccatgcctcagtttacttgtcagagacctaaccttggatctgttcaggagcagaggcagatgttggcacagatatgaggtatgaaggagtggtgtgggggatggggtgcaccttaaaatctctctctggcccgagattcaccccaggagaccccccggggagaagggaaggagagagagagggaagaaagagttgaagcagagacagtattccccatcagaggacagggactttctgccccctcccctgcagcacaccaaccatccgtgtgcctctgatcctgcttgtgtattgcttaaggggtttgtgtgccttccagcttgggcatgtgttgtgcatgcgtgcctctgtgtgtgtgtgtgtccgtccctgtgtgtgtcccctctgtggtgtcagtctctgatcccatttgtgcatttctggggggaagggagggtgcccccgagctcggtcttgtgtgtgcgcgtgcatgcatgtgtgcatgtctgtgtgtgagcacactgtttcctcctaatggccccaggagggatccaggcatcaggcttttgtgctgcttcaaggttgtggctgggtgggcgaagagagggaaggccttcgacagggaggggtggggttgagggaggcaaaagaaaatcttaaaagaccgtcttccctctggtctccaaggagatcaggctgtgaaatgatccgcacgttaattaaaaacgattatatcctgattgagccattcctgctcacatcccccagccagggagaggaagaggctgagagcagaggatgcaaaatggggtagggtccaatggcagggcatagccaggtggagccacagcccacggaggggagcacaggctgggggagtcaagtgggaaggtgttgaggggcacgtgcccaagtctgattggagcttctcctttgaattttagggactgtcttccagtggtggtctctgagatcccaggagtgggtggcagccacccagccccatggatctccactcatatgccaggcactgagcttgttgtttgcacagatcctgcaagtcagcgcttgtggttccagttttacagagaagtgacatgcttgaggtcatgcagccaggagttgggagccccagattggacccagtcctctgaccccgaggcccagatgcccttcatagctcctagctgcccccagattcccaccatgagcccctacctctgcaggacccctgggaggctggggcctaccatgacaagaacttctccatggcgcccctgaggtggttccttgctgaggtccgagcagcacagggctgggcggctgtgatgtccattcacgtggggagctgggtgactcactagcctggagcagccttgggctgactcaggtcacctttgccaacctgggcaaggcctgcctcgccccaccttgctcctccccaacactggctcatggttccacagcagaccagccacaggtgccccgtgaggctcaagacactgtatccacactgctgggtacctgtgccatgtcttttctggaaggagtctgggcctggtcacgctgggccttgcctggttatctgtctgctgtaagccttgtaaggactacggtggtagaaaagagtagtggtaacaataaaccagacgaccctccacctccaccccagcatcaggtgttgcggggttcacaagcgtggcagatctcagcatttgtgggacctgcctgctgccatacctctgcccactcccatccacccatgtgccacctctgtgttccctgagcccagcttctccgagaggaggagacccactgtggcttggccacacccagaagcaagtgagatcgctggccacgagtgggggctttttctgcttctctgagcctcagtttcccctttgtataatggggatgatagctttttccggagaggactgacaagagagtaaggaaaaccaggtcaagtttgttcaagtgcctggcagccctggaacgcacacagaggcccatttgtgcatttgtgcaactgtccatccgttcagggcacttgtgtgttgccacaggccttgggtttgctggcttctggggagggacacacactgtcacatttcagtgctttctaggagacagtctggggctcaggtgactgtcatctcagcatgagcctctagggggcaaagatgctcactggacccacctgaggctatgttagcaaaggtagagtgggagaagggagagatgtttctgctggggtaggtcctagtgagatttgctgaacctggtcccacatcttagcaggagccagaaacagtatcacgaggcatcagaggggcgggcagaacaggaagtcagcatccacctgttccccaaggcagaactgggagagaggcaggcagatgttcactcattccacaaaaagccctttgcactgaagcaggcagagagaccctgcctgcgctgggtcatccctgcaagatgccacctttcaggagaacagtttttgtgatgttggtatctgccttcctcctaaatatccccttcctgcccttcccagggcctgaaatgcttccgttagtcactgccgaggtcagagcatggaaggccctgattaaaatgcaaactgttacttggaggagtgatcagaagatgaactcatgtttgcataatgcagaggccacccacccctaggccccgcagggccgggcaggcagtgctgatggggttgtggtggctgcctggccctcatggggcgcggtagctcagctctgccagggcagcccatggggatgcagcccatggcgcctgttgcccactgtctcaggaacaggattagatgttgacatgacacttcctggtctgtatatgttgtcacctaattcagcagcacccctacgaccagatttagacctggggccactagtgcagcctcctggcttcaatgctgctgcccagtgatcactgtgaccatcctgcaatacaagtggggcagggacggcaaagctggggctcccagaggggagctcccctgcccaagtctaggccagtgaggccctgccagggctgaggtgtcatatgaggtgctgtcaccagactgggggaccgaggcacaagatgagactttgttggcccaggagggtaggctggaggaggcctttccaagtgtggcacggggcggagaggcagagaagctttgccggtgtcactcttctgtgggtgtcccagccacaggggccttacttcgggcccactcgcagcctgggaccttgggctagagtccctgagtggccgagagagagccctttctaggaagcagggcaggcgatgcccaaggaggcaggctctgcaggagctgggaactgccagagcatcaggcatggtgccagcctggtatgcttctcatacccacccagcccttggtagccctcctagaggtgaggacgtgggagcagaggggccacacacatagggtgtcgggaccagcctgaaccgggtcagcctgaccctgcacttggggtgcctggcggccaggcctgtcctgcacatctgattcatgcctcgtttacaggctgtgtttcattcccttcagtccttccacagtgtctgctgatggcgccaaggttctggcccagatgccctggcgaaggcacccaaagggacaggggctgggtctccaaggggaagcattttgctgcagaaggaagggtgttggctgcaggacacagcatgccagaggcctgggggtgtgggtggcgagcaggtgggattggggaggtggaggcagggactgaggccaaaaaggagtctgggccttgactgcttgaagggttttatcttgaaggcagtgggaaaagatgggtgctctgggcagtgagcaccgctggagcaaagtctcggcagtgggaacacacagggacaatgaggagaggcttaagaggatcagaagaggacccaggtggggcctcagtttcctccctgagaactcctgagtcctctggggtgtgggctggatgagagcagcctccctcctcctggagctgctgtgcaggcctagaatgctggtctagagggaagcagggacctgaccatctccccaacctcttgcctaagcccagagcagctcggcctagccctgcatcccctgtgagctgagcactgggagggactgttcagtctcggctgagaagtaggtgatggtcctgggggactgataattaaagctcagcagattataattccctgaaagaaagctcagcacagagagggaggaacagtgcccagagccttggcacaggctggaggaggattgctgggggaggtggtggtggggggaataagaatgatacctggaaccatcgtgttcagagcttcctctcggtgaggcctcctaggtgcccagccctgggcactttgctgtttccagtcttcagaccctccttgccaatgaaaggttcctgccatccccattttacagatgaagaaactgaggcttggaaaggtctggcaactgtggttcaaggcccatggctggtaagaagtgagcctgcggctaaaccctgggctgtgttgggagcgttggcctccttactgagaagaaggcactgcttaactcagagagaggctgtctgatggcagagtcctgggcaggccacaggcctgaagcaggaacaggttggagcagggaagacccctcaggacattccccatgtttgtggccttctgtctgggagagggggatgggatcaggggtcacactgtggtgactggatctgccattcacttagtcacctgttgtgtgatgccaggcaggtgacgtccttccttgggcatctcctctataaagggcttgtgttctcctggggtttgcaggcttctttaagaatctcttcctccctcattaatcctacaggtcccaactgagcctgttctcatgccaggagctcctggcacactcctttcatcacctgccggagctgggctctattatcatccctatttgacagaagagcacaccaaggcccagaggctactgctgcctggcggtcagccttctcctcaccagttaaacctgcttcgtgcagtcctgctgcccagcttgttgctcctgcctgtctccttggccctgcctggaagaccctcactttcccatgccctgtgcagagcctaccacctcctctgccatctcttccacagagaggccagggcttgagcacataggccagaggttgtcctctggcaatgcccccaggtgggcgctgtttggccagcccaggcttttaaaaataacattggatttcacataaaaattctacattttgcttccctgaaaaaaaaaatcaggtcggcattgcagggccacacacccacagggcactatcggcagagctaccatgggactgccaccttctgagtcacctggttccctgcagttcccactcatgtgccagctgggccctggcactctggagcttgccaccctgcttagacctgggttcctgccctggcatcctggctttccctgatccgaggcagattctatctttgaagctcatctagtaaatgtcaaaactgagaaactgattccaaactgggtcttagtgttttctgagaattctccaggccagaaagaaaaagaaagggtgcaccagatgcggggcactgcgtggggaaagataaggaggtgtgaaaggatgcagaatgcttggggaataataccatgttctccttgcctgttaagtacttggttggcaatgcctgaatactaacaccaatcagattctgcttgttctataagatgattcattcattccaggcattcagatgaccctcacagcatccctgatagagcaccattgtgggtgcttttattctcattttcagcagatgagaacactggatctcagggaagtgacatggcacgccccaggtcccagtaagggcaggaccctgacaagaattccgactcctgactcccagtccagtgctcgttctctctaagacactggaaaaattggctcttaggtgggcttctttctctggcacattttttaaatgctcctttagttaatatgcaggagggatttccatgttctcgtacataaccttttgctgaagtgacaacgtgcgataaaagggtcccaggagagccagtgtaatttgggctgtgagggacagagaataccaatgcagaagcctctgcagaaggcctggctgctcctgggggctgggagacccggggccccctcaccacccaatgcaaaggtctggccatcttgggccctgggaccacgtgtacgttctgattcgtcttccactgcttggtttatttttctcacgtttttgggtgaggatcttggttcctagaggagggaggtctaggcagagagaaaatgagcatccaggacagggggagagattgaggaggatgcctgaggcagacgttgaagccttgtttctagtcaagcactggctagttggggggtatcagacaaaggggtccacatagaaggcaaactgaagggcatgttcaagtgctgttcacgcctgcctttagcccccaacgaccaaaagggggcttggcatagcgagaccctctctctacaattttttttttttaatttagccaggcatggtggtgggtgcctgtggtcccagctactccagaagctgaggtgggaggaacacctgagcccgggaggtcaaggctgccatgagccaagattgtaccactgcactccagcctgggtgaaagagcgagaccttgtctcaaaaaaataaaaagttggggggatgttaaggaggttccagttaattgtggctgattctaaattgggaggcctaacaaatggtacttatcctcccgtgggagcagaccagggctaaccaaggccgctgggaatgggggtcatggagacagagccccttttccctcccacccacctgaaggctccaagaacttccactgcagaggtgtcagggacggacctggtgcagaccagtgggcccacacctgctttcctatgtgcgggtcagagcgtgtaggtgtattacatgcctgcctgtgtgtctgcgtgtgagctccttggacacacacaggggcacatatctgtgcttgcatgtttgtacatctaagtgtgtgcgtatctgtgtgttctgacaccagctcgcgacaccagctcgccctccacaaagctatttccaggccccattccccaagaacagccatctctctctcctttcccacctgacatggggcagggaggagagaatctgtttgaaatctcaacaggacatgggctttgcacctccagagagcaggacttgcttgtgtggacagaggtgacatagaaaggtttcagtttcatccaaatagaaacttactttttttttttttcgagacggagtcttgctctgttgcctaagctggagtgcaatggcatgatctcagctcactgcaacctctgcctcccgggttcaagcaattgtcctgcctcagcctcccaagtagctgggattacaggctcccaccaccacgcccagctaatattttgtatttttggtagagatggggtttcaccatgttggtcaggctggtcttgaactcctgtcctcaggtgatccacccgcctcggcctcccaaagtcctaggattacagatgtgagccacaatgcccagcctttttttttttttttttgagacggggtttcactcttgttacccaggctggagtgcagtggcgcgatcttggctcactgcaatctccgcctcccgggttcaagtgattctcctgcctcagccacccaagtagctgggactacaggcgtgcgccaccacgcccggctgattttttttgtatttttagtagagtcggggtttcaccatgttggtcaggctggtctcaaactcctgacctcaagtgatccacctgcctcagcctcccaaagtgctgggaatacaggcgtgagccaccgtgcccagcccaaagatgcacttcctctcattcagaagtgatttagaagtggcctgggctgctccaggaggtagtgagtgccccatcttaggtgggtaggtgtgcaagcagatgcccaacctgtgccttcctctcttttgtggtcccttctaagcgcaaagtgcctagggctgtgtatctcctggcggcagttctgaggtggccctattttgccaacccagcctggttggagggactgacagggcttctgcccctaggtgtcccctgaacttggcccacaaaaggcctgaggaatataggggactgtgattgtgtgtgtggtgtgtgatgtgtgacagtggacttgtttgtgtatctgtgttatgtgtgtgcatctgtgtatggtgtgtgtacttgtgcgggtggggcttcaagggttgagtgtggatatccatgttgtgagtgtgcattgcgcatggccctggaggatggggggacatttctgggctgtgtgggtattgactgtgaactgtgagtatgtgcacttgggccagtggaggtgtttgtggctagaacgtgtctggagggaactgtgctgagacccccaccgcctctgtcctggttcattccttcccaccccaggctcctctcatggcccctgcccccaggtcagacctgggaggctctcagtcatcccaaactctgaccattcatgctctccctcccagagaccttggcacctgccagcactgctcttgactttgtccttgctctgggataagagcaggcccagcagatggccgagaggtcccaaggaacagaggaacaggcggggaggaggcccagtcactgcttagcttctctgtaggagatgtagaaggaagtgggtctttgtgtttctgcagcatctggaccagatggagagacctttctggagatggcatgcacacttccagataggagctggaacatttccagaaatggaatgtttttagaaatgagacatggtgtttctggagacaggatgaggacgtttctagagaagagatgaaaagcatttctggaggaggggcatttctgaagatgaaatgagaacatttctggagatgggagagggcatttttgaggagtaaagatgaggcttttctggattctgagcattgctagagatggaacatttctggaaatggattctttctagagagaaactagaatacttctggaagtggtgtgtttttgaagatgatgctggagtatttctggaaataaaatagggcacttctgaagatgaggtatttttggagctgaaatgcaacatctctggagatgggatatggcatttctggaagtggaacattcttggagttagggtggagcctcagtagaccactggcatttctggagatggattacatttgaagatgacggggaatatttctggagataagatggagcatttctggaaatggaacattttggagctggggaatttctgggttaaaatgaagcatttctggggaagaaacaggtcattctcagagaagggacattttttggattgaggatgggacatttctagggaaggagttttctgaagatgagggggtcatagctcagcctggctgtttcaaggccacttgaggaggcaataggggagggtctcaggggcccagagaccccacctgtggtccttgttttgcacatggcccgagggagggtcttgcccagactcactcctgctgagctgcagagtgggcttctgaggaacctttccagaatgcagcctttgccaccccctggcccaaaaccctggcctgtgctggaatactaccagagggaggccagagctgcccagtcttactcttggggtccctacctgcttctggtggggtcctggcagcctctaggctcaccacagggataggcagtgactgaatggttaaatttaatttaattcaattttgtcaagccagctgaggcttgctccccagccccctctgccagaagcctgtacctttcctccagtcccccgccccatatccccctaccatggggatacctgagggtggccttattgcagcagacagatggaggggggctacaaggctgaacatgggcaagggtccagggcccttctcgggctcagcctgatttcagggcggggggccccagccacctccgcctactccagagaagcagatattgaggcctgtcaccacttgagcaggcctggagccccagagtaattatttctcttccttaattgaaatttcagcctcagtgatccagcctcagaagtgtaaggcaggcacagagaccctgcccctggtggggggagggggcgccccccaccctggccccagaaggagggaggcagtgccatcccaggggggcaggtggcttcacatgctggtgggtgggcatgaggtggacggctgctggtcaaggaggcagggtcaagggggccagtatggcatagtatggcctgagcactcagtatggcctgagtatggctcaggccagtatggcagctgccatgggaaggttgggcctctccctctgactcctgacagaggaaggtgagggggttgatctaggctaaggtagcatgagggagtgagtaccaggagactgctgcctcctcccacatctggcgggcactgaggggtgggctggggtgggtgaggggctatggtgtgagtggggcgggctggctggcggcaggcccagttcctggttcagggctgggtgaggcggctggcctggcggggcggggtggggtgggcaggagggtgcagctgaggagcctgttttcccggctgctgcggtcaggctgggaggagcctccgccacctgggtggtccctgctgccctacacggccttgggcctggcctgtctgcgggtgaaggcgggggcagaggactccagggaccagcaggaaactgggagaagccatgggcttgaaatgagcctggggtccacccctccgtgagcttctcaaggtggctctgaggtgctggggtaaacgtagcaactgccagcttgcagctgtgtgtgtctgagctcaggcaacccaggcaccacacaggaagctgctgtactcactggaccctgatgggctgcagagggccagagagtctacttgtgggcccttctgggtgtcagtcttctccatctggggaatgggttggcttggtgggagttttcaggcctgcattaccttcaaagggctcatgctgcaagcatgggctgtcctccctgtttttataagtacacgggccccagccttacccagacagcccagcacgctgcccgtagtatcctggggaagggcagcagctgtcatcagtgttatttctgaggtgtgttttcctggcaaccaggaaatttctgtcagtgggaacagcctgcccaaggcctcctccacccctggggaagacaagttgtatgacaagggagacagaggcaattcaaagtgaagaacgggagtgaggccgcctcctccgtgcatattgctcacacactggggcagccacgtgcccagtaaaggctctcttgaaaaccgtggagataggagccaagctctgcaaggccctgactagctcacctgacccctggcatctagaagctcacagcctattcttggtggaggtgtggctatggctgccctccaaggaggggaagacagagatggctggacaggatgggacaagccagcccccaggagctggggaagcgaaggtgggtgcaaatgaaaacgcagaatcccatttgcagtccatttgcttagcagccctgaccaggagggagagaaagaagagggcagagcagggagagatggggagggataaggatacagagagagaatctggcagccaggggtcagggagcctttggccgtaaggcctgggatgcctgctgcttactgaggctgtggcccctcctgccttccagagctaagaaagctttgctctgtctcagctccagacaccgcatccccaccacacattccagcacctgcctgcttcccctgacctctggctgccccacagaccccatccctacctccactccttggggattttgaggtcttatgccaccactccactctgagcaggctcagtctccctgtgttggtggtggtgcggggtggtgagagtggtcctggagcagtgggaactacccggaggccacctggggtgggtcccaggcaccagtccagctggccagtgggccacgggggctgaccttgtcaccttgggcccagatggagggcagcggtgctcggcccttcccccaagcacatacagccgctgagctaacatgactcaccgcgtggcagctccctctccccactgggagtggggatggaagcctccagatgctgcagccccaccctgagggaatcacaggccaggctgagcccttccaaagtggggatagctggggatcagacatcagcatccattgaagggggtgttcacccgcatggggtaagccctgtgcctgggactctgggcttagtgcccagctagggccttgggagacccttgggcttctctgtgctcagggggaaaggagctgtgcagcctctaggggtcctgcctgccccaagctgtgctggtggtccaggccccctttggggaggaccctggccaggggtccctagctcctcctctgtcatccagagaacccttaggtcccaggggctggtggtgttcctcttcctcagaaacactacctgcaagactggaaccctaacacagccacctctggagagttgggggtcacccatctcttctttgctccccacccaccctggtggaagtggttcatctgctctgagccctaaagaggaccaggtgggaaagaggcctgatgccgtgctgggggcttcgaataggtacaggcacttctctaaggttgctgtgtagggcaagaaaatcagctcagagagtgaatgaatttgccccaggccacgtggccatcaggtggcctggctggggtttgaacctgtcttctcagagcaaagctgacttggctgcacctccctggacttcagctttcagggagggaggtccaggcagcaggagcctgggggacaatgctatttttcatattgatttttgtattgacctgcatcctgttgcccaccccggcaagccccaggacagatcccgttttggttttcgccagaacaaagcaggctgtgctagacctgccaaagcagatacttcctcagagcaggtgaaaggaaactcaatcttgtcttttgttactcaaggagggagtgagggaatggctttgcccttgaacagggaggccgtgggcgggtgggaggggtgggtgaggcagtgtggggagagggcaggggcacacatacctgagccgagacaccacccccgcccgccgtcagagcatccggagtgtggtgaccatgttagtattcagcacaagcgcgcgcgcacacacacacacacacacactcgcgcacgcacacacgcacgctcacactcacacacttaagcgcacacgtacacgcacgcctttctttccgtctctccccaccaccctcctgagtcccctctaaaccaggaaggtagcatctgaccagcagagaaaaaaagagagagaaaggaaaagagaaaaagagagattagtgggaagaaaatccgattctggagttaccttagttaccagctcctaatgactcgcagggcgggctcggccaccttcctgagcagggggaccctccctcccgggcccctccatcaccccattaataagacggggcccttgttcatgagttctgccacagaaagggaagaatcaaggacttttcaataagagagaactccctgggtggttttgaatagttgctttttgtgtggcagtgcgggactcgtcctcggctctctgccctggccgcctccctcagctggctctgtctggaactgcctgctcctgggtctccagatggatgagcttgtttctccgggagctcaatcctttattgttcctgcctttcccctcctgacaccctcagcttagcagaggccacaggcagcctttgcgtctcaggaaagcaagagaatccccgaggtggttctaaaaaggcttaaagcccgggagtggggctcagcatgaaggaaacaaaagcacactccccacatccagggtgctgggcctgtcggccagggccaagctcacggccgttgcttcggtgccagtggaaggggaatgaatggaggagagactgggtgagggagatgacgatagaacaggagggagatgggtaaatccgttttatcagacgctgcatatcttaggaaagcacatttcagctcttttggcttttggcaagctggtcctaccctttaattttctaataaaaaggaattacgtttgctgaaaaggcagtaaccagcttcatgtcagtgtctcttgtggagaccataattcccgtcttgggtgcctgccggctctggggtgggaggtgggcttctgtggccacgggtgatgatattcaggagtcaaggggcagggacgtcagggcccacagcagatgccaggcagtgccacatggctttgccctgcttgccccaccctggcctgtccactcccagcccagcctctgatcatggttccaggctcaccacagacagggctggcagaggctcccaagactcacaatagacacttaatgaatatttgtggaatgaatgaaggaattcttactgccgaggcctgaggtagcaggcaagttgctcagagggtcagatcttggtttgaatgaatgaatgaatgaatgaatgaacgagtgaatgaatgaatgaataaaggaatgaatgttctccagagtctgaaactatctatctggaaggactaacctccaaccaaccccactctccctaagctctggcactgaattcactggaaactttgccaaaaataatatcccctctgcttttaacaaataatatgcactcgttttaaaagagagagagagagagaagtgtgtgaagtcgcaagttcatgtccatgctgtcccacacctgagtcccccagagccaagggtgggcacccttagaaggtcctttagaccttcctccaggctctgggaatcccctgcatttcttatctggtttgggggtccttgcacacgcactgttctacaaccctatggggcccctcggccatccctgtccccagtgagatctggatgtggttcagacctccctgggctgcagagtgtcccttcctgctctccaacctgggaacaggagccaggtatttatgtaagtctctgtggggtgaatgtaggaaaacatttttgctattacaactcccttcattccagtccctgatttattgatttttgagacagggtctccctctgcagcccaggctggagtgcagtgacatgatcacagctcaccatagcctcaacctcccaggctcaaaccatccttccaccttagcctcccgagtagttgggacttacagtcacatgccaacatacccggctaatttttaattttttggtagaggtgggatctcactatgttgcccaggctggtctccaactcctgggttcatgtgatcctcttgccttggcctcccagagtgcctcccaatgggctcacaccccagccccagttttaaacaagatcctgaaggcagaacactcaccatgggtaggcacttgataaatggtagcctttgtgatttgggaggaatctgtacccagtgctatgcttggttccacatcctaagcattgcttgtgccatactatatgccaggcccccagggcgcaggaacacacggttccagaggggtgtggaggcccctgagtggcagcgtccaggagcccagtcgctgcccctgcccgcagcagcccatcactgctggtatccagcctccttcagactggtgtatgccactggaaactccaggacatgtgcgcagcagaccccacacacgtggtttctctggggctgcctcctgaccccaatgggcaggcaccaggtctctgaagctcagctggcaaatgtaggagcagcccaggatttggctggttgggcacatgcacggctcccgtcctaggacctgacttaatctcaatccttagaggtggcctgggaatctgaattgttactagcctcttggctgccatggatcccttccaggatcaggaactggcatgaggcataggagggccaaggacatcttttaggctgcatggagcccggatccactctgcagcccctggctgggccgtaggagagcgggcaggctcagggcagggaggggagctaaaagggaatggaggggagaccagcaggagctctgtctgcccgattctggtttgggctgtgagacagtcattgcatttttttgcacagttctggccacacagtatttaagaggctttgcctacagacctgagtgactgtgtgaatggtggcactggtgcatacggggacgcctgaggaggaacagatttgggacttgtccacctaggactccctgtgggattgccagtatcacccctcttcgtcattaattcccagcttgcctgggggaggccagggggtagcatggggttcgggttcccctagggttcaaacaccagcccatctgccctgggtggcccttccctgctaagagcctcagtctgctgttctgtaaagtgggtccagccatttctgtaccctcagggtggccatgagggtcagtagccagaaaggcaaggccccacacagaactggttcacagaaatagcaggcagtttgtcaggggcagccttggcgtggttttcattcaaaatcattttttaattccaaaagaaaggaaatggttgtaaataaagaagggaaggccgggcacggtgggtggctcacgcctgtaattccagcactttgggaggccgaggcggacagatcacgaggtcaggagttcgagaccagcctgaccaacatggtgaaaccctgtcttactaaaaatacaaaaattagccgggcgtgatggtgcgcacctgtaatcccagctactcaggaggctgaggcaggagaatctcttgaacgcaggaggtggaggttgcagtgagccgagattgtgccactgcactccagcctgggtgacaggttgagactccgtctcaaaaaaaaaaaaaaaaaaaaaaaaggaaaactgtagaggcacataaacaggtcagagttcctgtctaggcttccctagaggtctttacttttactagtgtaatctgagtctttgactctgtttgtgggcatttacatacacaattaaatctttactgtgtacctactgtgtgctgaaccccgaggatttcagaccttgagccctgctgttaggggctctcacagtcctggtggggagactgacccctaagctgataaatgacccctccatggggagtgggcctgtaaagtgatgatggaagagggtccacaaaggagggaactaactgtgggttggcaggacagggaatggggatcggggaaccttgaagggacatggagtgtgaactgggactccacagagatcacaagtttttaggtagaagaaaggagagggaaaagcttggaagagcatattctaaggaaagggaggtatttgggatgtgctgactttggagtccctgtgggatggccatgatcaacccactgtagggagccaccaaggggttctggatcttggatgccaggccatggagtttctgttttattctctaagtcagggagccattgaaggcttttgtgtgtgtgtgtgtgtgtgtgtgtttgtttttgtttttgttttttttgagacagggtctgttgcccaggctggagtgcagtggcacgatctcggctcaccgcaacctcagcctcctgagtagctgggattacaggcacgtgccaccacgcctggctatttttgtattttttggtaaagacagggtttcaccatgttggccaggctggtctcaaactcctgacctcaggtgatccacccgccttggcctcccagagtgctggattataggcatgaccaaccacacccagccctgaaggcttttaagcagggaggtaagtgagctggtccagcatgtgtttttaaaaactctttctccagcagagcttacagaagggtgagcagggtgtacccggggggcttgtgtggagtccaggccaggcagggacggtggccagcgggtggaggaagccgtgaggatgtggccggaggagaggggcaggcttgggccctgcgaggtgggtgctgccctgggccatgattgggcatgagtggggagccgagccataccatggccggggacagggactgggtgcgttgttcccacatgagcgttgtggagttggcatgcattgggaggcatccctctgggctcagcccctgcctaccaggccaccattgcccctttcttggccagcagatcctccaccagcacctgtcagccccgagcactggaaacggcagccggcggggcctttgtgcttcaggattccttctccagggacacgggtgatagccaagcccggcagatgcccccgggggtgccaccgtgcccccactcgccatctccgatgctcagctgctccccagaatgaaagaccttgtcacaaagggaggcagggagaggatgcgcttccgtgccgcagcccatctgggagccaacgttattttcctgattgaaggaaacatctgttcagtcctctttcagagcgaggcaggcagcggactgggtcggtctggctctgggcaggaggtagagaacctgggctgagcccagagcccctgccctaaggggtttaagaggagctaccaccgttctctgtccctccctaaactgggagttcaggagctcctgccatccccttaagaagcctcggtcactgcctcccccaaggatgggggctgctggggcaaaagccatcgcctgtcccagagcaccatatgtgttttctttttttttcttttcttttcttttttttttttttttttgagatggagtttcgcttttgttgcccaggctggagtgcaatggtgctatctcggctcaccacaacctccgcctcccaggttcaagcaattctcctgcctcagcctcccaagtagctgggattacaggcatgcaccaccacgcccggctaattttgtatttttagtagagaaggggtttctccatgttggtcaggctggtcttgaactcccgaccttgggtgatccgcctgcctcggcctcccaaagtgctgggattacaggcatgagccaccacgcccagccccatgtgttttctgaggactccttcattatttcacacacacactagagccatgtttttgaaagatacggctgccaaacaaactgcatttattacataatgattaattcatcgcccccatttcttattaatcaaagacatccataactgcctatctgagctttgagttggggagagaaccagcggggcctcaagctgacagccttcccacccagatcaggggcactggtagatttgtgtcagtggagcctcatttggggtaaatgcacagtacccctgaggtttctagaagaaatggagacagctcacagacccccacacgtcacctccccaaacccctggggctgcctgggatgttttataaccccttctccagccagccctgagctcaggctggctgcttggcacttagccactggctgactagtggcctgtcagaggatgtggaagatggggtgggccagtccctgttgctggaggctgcaattagtggcagcctgggaaggagactgaagcctgggctgaggtcaggaccactgggcagagcttgaggtgagggcaaccgacatagggctgtcctggcagcccatcctgggctgagaacgaattctagggttccaggggcatttgacacgaggccggccacactctgaggttaggggctttttcaaagatagtttggtggcaggggcctagagtatggggagtgccgactgattgggttggagctgccctcttgtgcttagtcgcttctagatggaggccacaggagtgcttggtaggtccaggtggagccatcaattgtcagacatgcaaaaaacttgaaaagatatctcaaaagggccagtctggctgggcacagtggtgcatgtctataatcccagtgctttgggaggtagaagcaggaggatctttgagcccaggagtttgagaccatcctgggcaacacagtgagaccccatctctacaaaaaatttaaaaaattagctgagcatggtggagtgtgcctgtggtcccagctacttggaggctaaggctggaagatcacttgagcctgggaggtcgaggctacagtgagctgtgatcgtgcgactgcactccagcctgggcgacagagcaagaccagttctacctggctagggtggccccagagtcatggcggaaggcgaaaggcatgtcttacatggtggcaggcaaagaatgaggacacccaatcttctttactcattcatctaacactgactgtgtggcctggcacccaccaggaatgtccctgccctcaaagtctttacaggctgttggagatggggcagatgcccaaataagtcattgttgtcccaggtagtgccatgccaggggccatccagggagctgagggcccagtaaaaaggcacttaaactcaaatgcatggagaaggggacagccagggtgtgattagggaagacttcctgaaggaggtgctgctccgagaaggttgattgggtggtttttgtaggggttttcttgtttccactttttaaataactacttcatgccacatgctattaggtgcttttcacatacatcgtcatgtttaatttgtaccaacaaccctgtgagataggaaatagcttccgtatgttagcagtgagtaagctaaggatcagagaggggaggttgcttggacaactggcttagccatgattagaactccaataggttcttaaatgatgatagaaaaggtgtaggaggatgggagccgaggctggcatacctggcagaagaaacagtgtacgcacgcgtatgtcggtggggcactgtggtgtggagggctgcagggcttggtagcactggagtgagcagaggcgagcctgaaagctggcggcagggacctcaggggccatgacaggtatgtgagtcaagggagtgatgtggtcccgctacaaatcactgggggcttcagcccctaatgggacctcctctagctgcacccccctccctgcctgtgccctttttggcacctggtggcaggcacacctcaaagaactgctgcatctgttcctgcttctgacctcaggagacagcagcagggctggcatggagcatcagggaaatgcacaacaacacatcagcccctgggggcctcctggatctccccacgaatcctgcaatacccttcacaaccatccccgtccagaaagaggctgaatggcggccagcatctgcccgtcagcagagagttcccgctcttagcaccagctcgcctgagctgcctccagggacagtcctgcccgcctccccagagagccagtgcttccgctgccgcctaatagctctcccggctggagacgactcttgatatttagcctgcgtggcaggagccttaatagcagcaactctccctccctgctcctgcctcctgagccccagagacagctctgctcacctcctagccggcatcctccacgcactgcctaggcatcaggcggaggtctttctgcccactcttggtaacatcaaggaatgaatgagcatccaggagcacttcgagtgtgctattttctcctctgagattcagagatgccctttgagaggctattagcatggccacaatttaaatatgaggaaactgaaattcagagaggggatgtgatggagatggctcactttcgcttcatcttccccccctcttggtaccaggaagtggaccatgctccttcaggcctcaggatctttgcctctgctggtctttcttgcctggaactctctctcctccttctctctcatagatctcatctcagagaagccttcctgccctggtttatttactaaggttggtccttcttgccatactgtaagctccatgaaagtggggagttcccctaccttctgttgctcccctctgtatccccagcacccagcatagggcatgtagctccactagggcctcattaagtatttattgaatgagcaaatgagtgaatggataagcacatgcctgtactagttagggtaagatcagctgcagcaacaaaccaacctagcatttctagatggaggtttgtatttccggaggatggtgagtatttctggtgggtggaggtttcctccacatggcaatgtggccggggcatggtctgcatcaagctggcttagtgtggagggtccaccctggaaggagatatcacttgcattcacattccattggctggagcacagtcatgtgaccatgcccagctgcaaggaaggctgggaaatgtagtccagctgtggctccaaggacggagaacaggttttcgtgactccaaatcttcccataggttgctgtattggtctctctaatcagcagagccaaccgttaccgagtccttgtcactataccctgttgtaagcccttttctcaaattagtccattttattcttacaacagccctacaggagggtattataattagcccagtttactgatgagcaggcaggggctcaaatgacatgttaaggggaaaatacccattagaaacatgatgggccgggcacggtggctcatgcctgtaatcccagcactttgggaggccgaggcgggtggatcacctgaggtcgagagtttgagaccagcctaaccaacatggagaaaccttgtctctactaaaaatacaaaattagccgggcatggtggtgcgtgcctgtaatcccagcaacttgggaggctgaggcaggagaatcgcttgaacctgggaggcggaggtgagctgagattgcaccattgtactccgtctcaaaaaaaaaaaaaaaaaaaaaaaagaaaagaaacacatgatgggtgtctggagatgcagcagccaaaggctgagaccctcacccctgactccaccaaacattacagatattcaaatagacaggccagtgtccagaagaaatttatgcgggctgagccacagttgctggcctttgttttctctggttttgtgcttgtccaagggtggggaggtggttgagtacatctctctgagggtctgggccagggctcagcacttcatcatttcagctgtccatatttggagggcatctgtttccttccgccttccacagaggaggaagatgggtacacatgtggctagtaaccattagccgtcgacttccggttttgtctttctggctctttatgattgacaagtgctggcatgttggcctttctgccccttagcagccctccatgcaggaaagcgggagggaggggtgtgtggccagtgctaggatggggtctgtatggaagagtagctccaggaagtggagcctcatcaaggcaggtagcccacgcttcccgaggaggtgacatttggtcgggctttgaaggctaaggtgggagtctgtcagactgaaaaggaaaggcatgccaggcagaggggcctgtgcaaaggctaagagagcctggcttctcggctcctgtgtctgctttgcccctagagcttgcccagaacagtgacctaagtctgagatccttccgacccacactgcagagggaatgtctcctaaaactactgtttatctcacctcaagctggtgttttccccttgtccgtagagaaggaaagggtagcaaaaaaagaaggaaggtgaggagggaaagtgaacagagagcgactggactgagcacctgctggcttgctctgctgtgtcactgccataactcttccctagctatgcaccgtggccccttgctctcctgcgggcacactactgccttgggcctttgcacgcactggccgcctgtcctgcctgcagtgctcttcctggagagccacagggccgattcctccttctccttagagtcttctctcaaattacctctcttgatgaggcctgccagaccaccttatttaaaactacgaacctagtacccgttccccttagcgaatgtttcccccagagcactcagtcgcggtgtaacgccctgtacaatttactgatttatgttgctgcttattggctgcctcccttccgtgcgtctccccaactcctcccatagaagccaccaagggcagagtttttttttattttttgtttttttaatctcttatagtggtggatctcaagcacccgaacatagtaggcactcaataaatgtttgttgaagtatgagtgaattcagccctgggcaaaacgtgaccccatttcacagactaggaagtggaggcccagggtcttgcagccctgtggggagagggctgcccagcgccccgcaggagcctcccgcccggcatacccacgggccagtgccgggactgggcgcggggcggcgcgcgggcgcaggtagccatggtgacagcgccccagactactcgtatttcctgccttttgtgttcgcacatgccccagcccccagcccgggcagacgcccctgattggccgtcacactgcggaggggcggggcggggtgagcggaaaggggcggggctgacctgtgggcggggcccccggggcgaggctggtcttgtactggcgcgcgctgcctgtgattaacaggcgggcgcggccgcgcgcggctggaaaggggcggggcttccggaacagccgccccgggagcctgggataggggtgagtgctccttgatggcggccccgaacaaaggacgcctccagacccgggcttcctgtccgtagtttttcttggcccttggagtctgagagtgagaggcctgctaggccagcgccccctaatcctcatccggccgtgggtggccaggcactgcagacgtgtccccgggggccgaccaccttacttgccacgctggcccctccctctcctcaccaccacagggcctttgcacgtcattcctggacactcttaaagtccttctttccggccgattcctcaccccctcaggaggctctccacacagaccgtgacctgccctgcctggcactcctctgcccagcgtttatatctctttttgtgcactctccgccctcatcacacgtgtgcctcagggcagggccctgtctgtggcctggcacacagtaggtgctcggtttgtgttgttgaatgcctccattcatcaggttgcctgaggcttccttggtgggtggtgccggctgtactggcccgggacttgggaggaagggagacagatgtgccttcagacccagacacagaagagtttgtctccaaagccagggcactgggtcagtgtctggcctggaccccaggcccgaggagcctggtttggtgtgtgcccttggtgaatggcctactgtgctggccagacaggagccccaggggctggccctgcctcaggaggaaggcagggtcacagacacaggctggaggggcctggagtgagggctgctcaggacccctgccgaccagacctgggagccccagcatctgactcttcgtttgtgtattacttgctgtgccttgtcctggcttgacagggttggagtgggggttggagtggtagagcagcgagaaaatctccacaccccttacccccatggcactcccacaaaacaaaagggagctaaactcatgaaatcggcttcacggttatacatggatagccttttgggagttgggtgatctctggggtatatacattgtttcctcaccaacaccaaaagaaaatgcaatttgagccaagctaataacaatgtattaaatcagagcttcctgagctttgctgggtgctataaaccaccccgaagtttgtactaggagcagattcctgggctcaggccaccctcaaatcacagattttaaggggtggggctcaggaatgcccttttattcaaactgcctgtgtgtggttttgatactcagtcttaagtccatcatttgagaaatggaatgacagatatctgtgtctcagaacacatttgaactcctctccaggctctagaaagtctaccgttctctgccccagaccctggctccagattcaagtctagactggaggaactgtggatcctttgggatttggaaaaaagttctagaccctcttcagaaaaatgtgcttgtccacacacacttcaactttgcattggatctcaaggtctcatacctgggctgggtggtctgtaaagcaggggagacctatttggggaaaggcctccatgctgacactcacctgaacctagggccaaagtgtatggttgtacaagttgtacattgtacaaggatccctggaagaaatcgagccactggccagctgtgcagcctggcacctggggtgtcttcctgttttgtacaaaggcattttatgccattcgcctaacccaatcttttttttttttttttttttttttttttttgagacagagtttcgctcttgctgcccaggctagagtgcaatggcgcgatctcggctcaccgcaacctccgcctcctgggttcaagcagttctcctgcctcagccccccgggttcaagcaactctcctgcctcagcctcccgagtagctgggattacaggcatgcgccaccacacctggctaattttgtatttttagtagagacggggtttctccatgttggtcaggctggtctctatctcccgacttcgggtgatccgcctgcctcggcctcccaaagtgctgggattataggcatgagccactgcgcccagcctccctaacctgatctttaattcccctcctgcctcccatgacaactcaagttagtggcactagtaaagttacagaaattatgtgccttagccatgggaaaccggccctctgtaaactgttattaaagccataacaaataatatccgacagcctgtacctactagtgttcagttcctggtactccagagccctaagcgtttttgggcagtggttggggggctgccaccaggcctcaacttgggttaggaagatagggcaagggtgcaaggcccgtctctgcacagagggtgggagagaggagtaactacatagtaggtgcttggtaagcactttcccagtctacattcattgggtccattttatagatcaggaaaactgaggctctgagagggctggtaatttggattagagaaggcccacctgtctggagcggctttatgaacacaggctttggagtgcgacagcggggaggtcaggagaggagaggaaatagccatagctgtacccccacaacattcacaccatgcctccccctgaaggctttgcctgacgtttggactgtttagagggctcctctgagctcccacagcctgagccttcctgtcacggtgctgccaccctggtttagcaggcctgtttacacactgtcaccccaagagcctggcagcaccccagtgctggactgtgagccctccacacagggcccagcgcatggtgtgtaatacagctctatggaatgctgagtggctgattaagtgggctctagcttctggcagctttgctccctgggtggatggggcgggagtgatgcagaaaggagaggtgtaggcctagagttaggagggcagggagagcactgggcactggaaccacttggcagggtgagttggcattccctgtttgccacgaccttggggtcaccctcaccaacttgccccagctgggcctgactgaagggcagggggcctggacattggagcccagggagggcagagggtggtagactcaggagagagctctttgtttgggggcatttctccagcagagacccttagtccctccaaggagcatgtcctcctccatcagtcagtgtcctagccagcaggggtgcgtccccccagatccttccctgcttatcctatcctgggcccagccatgctttctcccatggggtcatgtcatcctgaccctcagatttggctgggtcgccccagggctctctgacaaagcccagctcctcccctggcacccagcatccctcagacccggcctacaccctgtcaagcccgccttctcttcaccccaaggcctgccgtgcctcacagcttgggcagggctgtaccctctgcacacatcacccttccctatccccaaccctctccctttagtgataaatccagctggccgctctttgcagctcaccagggaccagtgtccccagtgcggccctcggtgcacccagtccttacgtgagccctagccaccatggaaagccaggagggcctggccagcctccatgtggggtctggttggttattgcagggcctgttgggactgcctgtgtccctgttcccctgggacaggagttctggagcctgcgaaacttaagcatccatcatgggacctggcacgggggtgcctggccacagcaggagtgaatgaattttttttttttttttggagacagagttttgctcttgttgcccaggctggagtgcaatggtgtgatctcggctcaccgcaacctctgcctcccaggttcaagtgattctcctgcctcagcctcccaggttgctgggattacaggtgcctgccaccatgcctggctaattttgtatttttattagagacagggtttctccatgttggtcaggctggtctggacctcctgacctcaggtgatccacctgcctctgcctcccaaagtgctgggattacaggtgtgagcactgcacctggcatgaatgaatttttttatttttggaaactcctttgaaatagtgtgtttgctttccactgtcttgttcttcacctttacctcccttacgtataaaggtagatgcagtcaagtaaagtgtgctagcttcaaatcagaaaatctccatagagtcttccgcaaatccttgagcgcctactacgtgctaatctgtcccaggtgctcaggacacagtgtgaacaaaatagaccaaaaatcctcttagtgaagcagacgcttgagtcgggggcactggagaaagcaaatcagttcgtcggtaacgaggcagggaagtggacggggaggaagaggggcttctgtgaaggtgtgcttggccaggcctcaggcttcccacctgttcactggggtgatgtgcttgcccggtgggaacggtattctgttcatgactgttgccattgttattaaccgcatgcccattgcctttcagagtttgtgggccctctcgggcagcccccagagggtgctgaatgccgggccctgtgtacacttcaccctatctccgcggggtcaggctggccacctccatttacagaggagcagatggaggcccagggagggatagggtggtgtcacatgcttggagcggggtccagggagagctcttggctccctgaggcagggagaccctgagcccagacacaccccagtttataagtggggacagctgtggaggtgttgggtgctcagccctgggcctggcttctctggcctgaagacggcagctcatctggctgcagagtcaggaaagatttcctgagcctggactgagaggccaaggtgggtttgcggaggcaggagagagctccagatcaggaggcagtgtgggccaagccggggggcggcaggatgtgagcacagagagggcagcaacccttctacagaccagttcaattccagtaaccccagcctgccgtaggggtgggggacagcctggctgcagcggggcccacctgccagtgtgtgccttgcctgcgctccaccttccccctcgggcactgcggctttcttgggacagcaggaccccagttaaacagccctgtttcctgcccagccgtggctgccgcctcttctcggaggatttttttttcccacaactcaacaaccactaccacttgcagctaagcagaagggaagttaggactcgcattttgcctctgtagcgcctgtaatcagccccacacagcccccgccgcaggcgcccatcagtgccacttccggagactacttgagatacacctgctcacgctaaaaggagaagcagtaatccatcaaaacaaccccaggcgccggggcgggagaggctgagactcagtttcccctcccatggaacagggcagtgttgggcatctgaagtccccacgggtcctggcattctggaagaacacgactcagtagctttccccttctgggcctcggtttccctgtctgccaaaggtgcagggagatgagctcccagctcatgcctctgggcctcctacctcgcccccaccctcatctctccctttccagagacattataaatcaaacggcttagaacgtaaggcatcagaaattctgaaaccttcatctattattaacgctgacagtaaattccccctccgagcgttttacatagcaactgttaccaagactcggtggtggagctgctgctccagcggccgcatcccagcagctccgggcaggatggcagggccgccacaagccctaccaacccggccaccacctgggcactcagcaaaccctctccaggggatgggcggggagggagcctttggcagaggaaatgggtggcttacagctgaaaggaggtcccagctgcttttggtgagccctgaagaccccagctcctgcctaggtgaagacaaggggccctgaagctcccaggccttcagaggcagcacctatggacagggacgggctccgggagcctcccttccttgctgccctggttagaggaagcttgtgagatggaggacaggaaaaggcttcgtaaactggaaagggctgtgcagatgttgtttaccgactcacccacctgtcagctagacgttcctgagtgcctgtttctctgcaggcagtatctgggcaccagagatttaaaacaaagacaaaaggcccaatccctgtcgcatctggcttggtaggagacagacgcgccaacccctaattgcagttgtgcaatgatcaacgtatgtacgaggagcatactcagggcggtgaggatatcgcagagggcccttcacgggggctgatgctgggcagggttttgaaggatgaacaggggagggtctgtgtgttctggacagagggactggtgtatgcaaaggcccaggggtatgaagctgcccagctgacaggtggattacaggctgacctgttttggtggggaggggggctggtagagggagcaggggtcagagggtgcaggaccttgaatgcaagcaagagagtttttacttagaggttctggtcgccatggaaggttttcagctgaggaggaacaaagatttgggtttggggagtatcaccctaattgcgcagataaggataccaaggcctgcgcaggtgagaacacctgcccaggcaggaagcaggggaggctggctgctctctgcaagctgttaagatgcacctgctgtatgtccatccccacatggggaagggtggtgtgacctcagaccctgggacagcatgcctagagaagaagaagcgggcagggagcttgtgggctcttgccaggtcagagtggccaactacgaggagttgtctcactctttgcatctccagaaatcaggacacaagttgagacacagacttcagcccagctatggatgcgtccgttggcagtctctccacctagtgacaaataatatatatgttcattgcagaacattcagcaaatagaagtctcaagaaaataatgtttccctgcagtctcaccccaccacccccaccctctgatggccaggtcacattttgggcccagttgctccagaaccaggtacagatacacattttttaaaacagaagttgcatcatgttctttctgcataccctcagtgacctgcttttcgcccttcatacgctggaatagttccccatgtctgcacatatttcggggtgaggtttgccaagagccacgctagccagaggggacccagctgacctagaatgttcggtgcttgtcttcaagggcagaggccgtgcctggcctgcccactgctgcactcagcaccaagcatggagacaggcccccagtggatgctgaatgcagagctgtgaaaagaagtggaagctgtgtccgtgaagctgagtacaagttggacagagcccactaggatgctgtaatcttgatctggggctaaattgagtcttggggtaagatttgtgcttattaagggctctggatgcttggggtaatagatggaagtttttcagggagggcttcctggaggagatgggctgtagaataaagcagaagggaaataaatgcataactgtccattcactcatctaacagacatccccagagggctccctcctggtcagagccctgtgctggacaggactaggcacccagacagagtactgcccccacctgctgccagccctgggggaaagacagacaagtgcccaggtcactgtggctgtgtgctcgagcagtgctgtaatggtggaagggtagacagtgaggggccaactttactgatagcccccactttactgatatcccccacctcctagccaaagaagttggggattgatttatgggagggagcagtttggcatcaaggtgtgcctgtagatgatggacttagagggctcaggagggaagcccatacatcctgcatactcgggatgggcttggcatcagggtcaaggtcacccagactgtacccagaagtttggctcagcccagtgtccctggcctgggaactcctggatgccgagggtttatggcagctcagttagtggcctagccctgggtccccgccatggagaggggcccctgacgtccaacgtccactcccagagtcccacaccaaggaggcccccagccccacccagaagtcaaagggtgtatctttccagagtctagaagctggagctgctgtggggcctgggccttggtctcctcggctgtcaaatggtggcaccaccctgcagggaacgtgtggagctaaaataaaatgtgttccaggtgctggtgccacagggcttagggccacactgcagaaaacccttcctcctgcttggtcctagctgcccagggccaggccaagaaaggcttcaggaagaagcccccacctcctagccaaagaagttggggattgatttatgggagggagaagtttggcatcaaggcgtgcctataggtgatgggcgtagagggctcaggagggaagccccgcagattacccccttgccaagaacctcctagaactgcatactcaggggataggcagctcattcacagtgaaagtgttttggagtcaaacagacctgggttcaagccccagctcattcacttcccagctgtgtgaccttaggctagttccttgtcctctctgtgctcagagtcctcatctttacagtggaaatgataatgatagaccagtattgtcctgagggttgaaagaggcgacccatatgtgagtgcctcagcacagggactggcacatagtaagtgcttggcaaatgaaaatggttcttctaaggctttttttttttttttaactagtgcccaaggaagtgggggtggcagattcctcactggtctcttaggttcctggcacacatgcagccaccagattgagcctctggaatcgtaccaatccatttaccagcccacgtcattagctttttctgagcacctactctgtgccaggcacaggggcaccatggtggaactggaagcagcaggctcgctgggaggctgacagctgtggatcctgacctgtggagtggccagtgccccgggggatggtggaaggggaagagggtatctagggcaggcatcagttggaaagtcacagtgagatttgagaggaggtgatccctgaactagtgacaaggcctactagcattttgccaggcaaactaggagcaggtggaaaggttgggaggcacaaaaggttgggagactcccagagggtgccagtagctccttgtaagtcattgttgctgggcatgaaatttgggagctggggaggtgggtgggaatcccctgtgaatgccaggccaaggaggcagggacagtgtctgattggtgactggggcctgggcagcatctgagcagggaacacagttgagtgggagaaaggtggtggtcactgaggagcgagggcaggtggggggatggaaaggtctcaggacagggggcccagcagggagggaggcatgggagggaggtctcagggcatccaagggacttttggttgaaccagaagttcctgagtgtgagcgcggcccagaaacagccacaggcctcatccctgcactgggctcgaggctggagtgccaccagcagctacccatccattgggcatgcgtgtgtctgctgtatgccctgacaagacagatggactctgccctcacggagcttaccagtgcagagagaaaagagagtgaataaatatacgagggaggtgattttggagagtggtaagagctagggactaggggagttcccttaggcagggcagtcagggagggcttctcagatgaggtgactgggctcattggagaagacccaggaggatggcgtcccaggcggagggaacagcatgtgcaaaggcctgggggtcaggggcatggcatgtgtgaggagccagtgggagccagtgtggttggagtgtgcatgggagcggggtgggaaatgaagctggggaggagtacccctaaccttagacagctaagaggttcaaatttagttgagggaaagttctgactctacccccagcagcaagggagcttccccaccaaagcaggagatctggctctcagcattcactttactttcctgtgtgaccttgagcaagtggcccaccctctctgggcttccagagtctgtggcaacacagaggaaagtgaggtgcttgctcagagactcgccagctgtgactggccaggggtttgatcccagtcatttctgctctgtggtgggggacttgtcgggaggggcaggtagaggtgagctcagtagaaccaagagcccccaggacacagggcatccaggaggcctgtgcttccacagcctgttcactccttcatgcacccgcctccccctccccactgcactcctgcccacactgcccactccccaaccccctcctctctctagggctgaaagcaagaggctcccatgggggctggcccgatgattggcagagtcgataaaggccacttggaaaccctcctgctccaggtggttccccgctggcatttgtagctgggattccgaggccagagctgaacccagagatcatttatcacacagcctcaaatggaggcttttctggaaaaaaaaaaaaaaagttctttctctgagattccaacttgcattgtctaaaacaggttaattggcaacaccgtttcccccagatccttccctgcatccccccgctttcctggggtgggaatggcagcccctggaagtagagaagggggacaggtttaagacacgccgcattttcagagcttgctagccatgtggagactgccagaggaatcctagagatccacccagtgaccacggctgctgggctgcacttagctttgtgatccagaccgggagctgcctgtgaagtccctccccaaggagctggaggtcaggagcctgtgtgtctcactcccttccttgcttgttcctatgggaaatgacaattgaccactgatacacgcccgccctcaaggagctgctggcagcagcaagaggggtgagctgtgctggggcagagggggcaccgagggaccctgggagccaaaagacggggccagcccactctgccggagtggccaaggagcaaaagcagtctgcctggaaggcaggcagggagaagtgtgctgggcacaggtacgggggcccaggtcataaaagaacctggtgcatttgaaaagctgtgagatcccagcatgcctggagtgtagaatccacgggactcatagtcagaatgtttctgtttcacaaagccagagaggttgggagggtccaggccacaaaaagcctagaatgcctggttgtactcctcaagataggctgggcgtgctgcataacaaatatccccaaatatcagccccttcaaacagggtttgaccctcactcatgccaggtctctgaccagacagctgggaaactgctcactgatgtcactcaggacctgggcagacagaacaacagccattagggctattttcgtggcacagagggagagagacaggtgtacagatgcatggagcttcctaaagcagcatgtggcacttccacttgaatttcactgcaaagtgggccacatggccatcctccggacatctttatgggctagtgacacgcttgctgcctttggctgaggaggacaggaaatatttggtggtggtgccgacactgaccacaaagaccaagaaggttcagcactttaccctgagcaaggtgaggagccttgggagggattgagtagagtaggctgcagcctcatttagttttactttttaactttttattgacttgcatacagagaagagcacgaatcataggtggacagctgatgaatttctgcaaaccaaacacactcgggtataactgaagttcagatcaagaaaaagaacatcaccagcccccagatgtcccttatccccctcatcaggcatttcctgcccaagagtacttttgtctgcctttgagtttcacagacatgaaaccttttctgtccaacttcttttcctcttttttttttttttttttgagacaaaatcttgctctgtcacccaggctggagtgcagtggtgcgatctcgcctcactacaacctccgtctcccgagttcaagcaattctcgtgcctcggcctcacaagtagctgggattacaggtgcctgccaccacgcctaactaatttttgtatttttagggttttgccatgttggccaggctggtcctgaactcctggcctcaagatatctgcttacctcggcctcccaagtagctgggattacaggtgcctgccaccacgcctaactaatttttgtatttttagggttttgccatgttggccaggctggtcctgaactcctggcctcaagctatctgcttacctcggcctcccaaagtgctgggattataggcatgagccaccgcgcctggcctcctcttcttttactatttatgagacctatctgtgctgtgtgtggcagtggtttttcattattgtgtagtattctattgtgtgcatatgccacagcttatttctccctcctacttttgatgaacacttggattgtttataatcggaggatcttcggtggcttgcgcctgtattcccagcactttgggaggctgagacgggaggagagtttgagaccagcccaggcaacatagcaagacctcatctctcaaacatttttttgaaaactaaaatagttggaggatcttgtgaatatacctgccgtgaacattctccaacacattgtttggttcctgtatgtggagttcccattcaatgtgtgccttggaagtggaactgccatggtctcatttgcatttaagaagcctctactggacacacagaagagaccgaggtacagtccaggcaggaggtggaggggaaggtatgtgggcccagccctagggctcctccacctcagaatccagaaacatccccagcgtggacttgtcttccaggcgacttgggggtctgtattgtacacacaagatgaaaatcgtgtaaagcaaggcccagacacatgaggctgagtgtgcagccccaaacggcaagacgtaggccttactgtgtgagtcacacggtggtgttatagcacattctagtacacaggcaagaatagttgtataatatttgaatgcactgaactcacttccaccaggtacacgtgtgaggaatctccctgcaagtcacccgtttcacaagagggaagacggcccatcttttaagtcaggggaggggaccacttgccctggggcctcgggctggggttcagcctgcctctgttccccactcttggacacacaggatgaagggccccagtgctgatcgctcacaggggtggtaagacttaccctgttaccctcttggggtgtggcatttcttagaagccaagcatgggtaatcctttgcctggaatgaagccaggagaatggtggggcttcaggctctggttctagaagacagggcttcttgggagctgcccctggagcctcccagcctgagcggtaggtgctggagctggtgcctttgaacttggattcatcacagggaagacctggggtccaggcctggttccgaggtgcccaggccagcccctgagcagccaggcggccttcttgtgaactcacattgtagtgtcccgtgcagctgtcctggtcctgcaggatgcattccccacccccaagcccttaagggctgttgggttttgtttttaagaaacatatggcctagttgttactttggctggcctccccaagcctcatgtctctgagacccccactcctaaggaagggggccaggcattgatgggggtgtctgggaagccgagggaggatgcctgccagttatgagaaagatgcatctttgtcgcagacacatgtggggcgctctatgtaaattgtttcagcgcctaacaggaagaagaaaaatgaggctttgatgcgagccaccacctctcagccaggcgtggtgtcactcaggcgcgtccgaggcctgcttctattaaggagctgtaagctcttctcaggccagagacccagggtgctctctgggcaggaggtggctctgctctgtctgccgaactctgggcgtcagcactggggcgtgctggggcctcaacccagccccacctccaaggcaggcggagagcactgctgatggattccccagcactgcactgtgcgaggcccagggcggggaccccagcaggcagcgtggtagggtttgctggggatgacaggcaggcgcacaggcggcggcactgttaggccccatgtgatggccacagcctggcacaggaatcggtgctccaggcagcagacagcaaaggtgtggaggcaggaaaggagccactgtctctgaggcctgggagagcactgcgggtgctggagatagatggtggcaggggccagctcaggggagggcaggaatctggtcttgtggctttggaagcccatgggttgcgagcaggagagggtggggtggtgtgagtctgagggaggtctcagatgggaggggagggcggagtggggcagggaccagtgagggccagagtggagactgggcaggagggcatagcacacacatggacatgcttcccaatgagccctggcccagtcaactcccagctccaggaaccccccacagccctttgctggggtgcacaccgtccagagcactgacttccccaacgagccaggtggaaatgtcccagggaggaccccggggcctgaggagcctactgaatcctcaacaaagaagggaagagaggcctaggccacagcaggcccagaattattgtgttatgctctggatcttggggaatgtgtaatccccacaccgtatctatggcaactctccattaaccagaatttggttctacaaattcctgttcccattcattctagaaaactcagagctgttggtctttttaaaaaaactcgctgaaaaaaaaaaaaagatactaaagaatgtaaagaagaaaatgaagtcagctccagcccctctgctgagaacacactgatgttagtactttcgtgcatttccacccagtttgtttaagaaaattgggattgtgttgaatgcctgcttttgcatcctgccttttccattgtgcttcagatcatgagcatttggcaggtcagaaaaaaaatgtctttggaagctgggctgtggggactggggtttggaaggcttgctgtgtgctgtgatccttcaggggtcatcgccctccctaagcctcagcctttgcctctctgcagggagagactgaaggacatttctcaggctcccgccaagagtctcagtgttttccttgcaatggtggccttgttattccagccttgctactcacaggtgggcctggtgatgtttgtggcagggtgggcacagggctggcactgccaccaagtacgtagttgagccggtaagctcagaaacgtgggctcactccagccttgagcactttcccatctcgtgatcctgggcaaatgactttgcctctctgaacccctatctcttaagctccagaaccgggtggttgtgatggttcattggcttaatgtaagtggaactcttagcatataataagtgctcagtaaagaggaactgttgctaccctgaggattgctggtatctgtgatgtcacaggtgtaatatgaggattaaatcatgaccttcttgcagcattcagcagaatgcctgggacgtaggggacactgtcagggggtggcacctggtcccatggtctagccaggactatctttgtggcccttaacttgtgcagctgcccagggctggcgctcagaaatggcctgtgcttggtgcatgctgctctgctgttgctatcttgagtttttattactttgtgagcaagaggccctacattttcattttgcactgagccccacaaattctgaggccactcttaacaagaggattaatccctagggcagactggcagggcaccccacacatccacggtgctcaatagctatttggagggtgaaggcaggactgaatgggccttggttcagaggagaacagtaccccagcgaggccaggtggcttgcccagtttacacgccagacatagggccaggcagtgctctgaccatcacgtgaggggctgtcagggcgacggtgtgtctgtcaagggcaggaagtgggctgtgtggagtgccagccaggatgggcagggtagcctgcgccctgctgacctgcagccagacacactggggagacacaagacgactcaggttggaatcgattgaaaccaagccaagagcttgggccttggagtgcatgggagggggaggaggttcagacccaaggtggcggctgcggctggtgttagcacttcttcccggcagggtgggcagggccccattaggggaggcaggcctggatgccccccagcaccctttcatgagggggagagaggagaggagcaaggcccaggccacctggtattcagaaggctgaagtgacagtgtcaggcagtttggggggcagatgaagccgtggcaaagggtggccaggaggccagagcagcactcacagatgaggtgggattggggccacctgcatgtgtggggaaggagcccccaggactcggtgtgtgggcctctggctgacaaaggccactctgcagaaaggaaattagaaagaagaaatgatttcttggctcatgtcttcacgaacaagggagaaagttgctggcgtggtctcctcacagaagagccagggtatctgaggggagccctttctctgccagctgggtcaccctcagggctggaggtgctggatgccagagtagaagtggatggatgggggtgtccccccaaaaggagagggagacaaggtgaggctgtgccttttaagccttctgcgcaggcctccttgggacagcccgggtcggatctcagactgcagcatgtggggctgggagccagctcccccgaggcacgggggctcaagaggtctgagcagcatgctgaggtcagggctggaggagcagaaagtagtagggagccactgatggcgtcataatgaaggagcgacatgacaagcttgtgaggggccacacagggcagaggctagggacgaggagatcccgctggcagctgggcatggaatttctggtgggtagtgaaacagccagacctaggacctgtggcagtgaggatggggagggggccagatgggcacacttcaggcaggggaaccccaggacttgggggcctcctcagagaggccttacagaaggactggggcagcaagcaaggcctgtggggcgaggaggcctaaggacaccatggatgcactggagccaagccattaaggaccctgcaccccggccagaggcctcactcaggatggctgcagtggagactgaagagatgggtcgggtggagggaaatgggctttgccctcaggaggtggttgtgggaggagatgcggtcacccgggaagagaggccagaggatgggaccgaggagcagcgacacgggaggacggcagggcgggtgagcgggggggccctgcccagggtgacagggctttgctgggccctccaggaccctaggcagggtctcccctggaaccaggcggtacaaggcctgtgatgggaggggcgggaggatgagggattgctggcaggagggcctgggaccagaagtctccactgcagccatcctgagtgaggcctctggccggggtgcaggatccttgtctacctgcggggtagggagacagcctgtctcccaaagggcggtggggtggctgagcctcaaggacaaaggcaggcgggggcaggggaaggagcctgtggctgggagcttaatggccccgaaaaaaaaacataaaaccagagaattatggggagacataaacagagctgtcaggcattagctgcagggagacggctcagcctgggtaagagatgctggcggctgagctgggatccttgcgtgtgcataaaaaagacagaagttataaaaggagggagattaagaagatactgcctcttccatgattgggctccccggccaattcctttctcacgccccggctgaggccccagtcgcacactgaccctaggggcctggcctgcgaggcctggccaggtcaggggccagggcctgccagcggccagggaggtccatgggggtgggtgggggtgggtagcgacttggcccaagctagtggaggggccggggagccaggcccaaggacgcaggcggcgccagccccagcaatttatgggtgctcacacaccctgccgtcttcattttccccgttgctgctgctgtcattagccaagcactaatgggcttaaatttcaccttaaaccatccccactgtcctcagcagatgacaaacgccctactctcgccggctgcaaagctgctgggcggcctccaagcaggcatgtgccctccctctgcccgtgtcctctggccctcaataaggaggctcctaaggacccagggcctgggatactcacaggccgggagaattcctgggggtgtctgggagcccaaggaagggcagggctcaggaaagggggcttcagggggatctttggagaccctgggatgataatggatggggagacaggagcccagggtccaggggcaccccactgtttggccttggcagggccatgcccctgaccctgcccaggtgtcatgaagaagggccctaggagctacccgccatgtttttaaaagccttagggaaatcatattttgcttaggctaacaaaaatagcagtggctttgcttggggttagaattccatccatccatccatccatccatcaaattcgttcactcattcattcagcaaatgtggcccatgagcccctggcctgagcaggtccatgaaaggcccgactagctgttcatttgaggcccatgagagggaacaagtgggtgatctctaaatgcagttcgtttgggagacaaaatcctttagcagtggctctgaggatgggaggggaagtgaccaaggggctctagaggctgtggggacagagtgcatcaacctggggtgcatccagtccatgaggcgggtgtttgcccgaaaaggagacaggaatagagatggagctatggcagagatgcagggattgctgggggctccctgctcatgtgtgcacatagccatggccaccgcctcccgcctttgtttcccagcaaggggcaggtgcccgaggagctgctggggttgatccaccatcaaagccggcctgtcgggggctggtatgcagagtcatccctttcccatgggaatctcgctcccttccaagcccccagcacccgcctttcatccctgtgctgagagccagtactcccactgacacccaaacagtgatgccaaggaggcactgccagagggaggccaccaccatacaggcctggaatgtcacactctctgtccccaccaccccccacctgcagtgagcctaggggaaagaacaggctggcacaggcattaactggagatggagggtggtgcatggctctgggccaccatgctgtgtgtccccttgtcctctctgggcctcagacatgcaatctgtcacctaagggtattgaccctgccaggctctggcacaccaggaaatgtaagccagactcaagggttggcaatatgtacgggaggttgggtgaggcatcttctccagtccaggaggaagggattcctaactggtgcttaggaccatggactttggagaaatctattcctccccaccagtatctagaattggctgtggagtcctgccaatgctctgttcctgacatttctagaatttctccctgcatttccagcccctgccaccactttggtctggccccattattgctctctgggggacagtcccagcttcctgttcactggcctcctggcctcccctctcacccccatcaccaatccatcctgcctcactgcagccactgcagactccccaacacacatgtgtgatgctcactgttgctcactctctggggctccccgtggccctcaccacaacatctgtgctctccactgtggcccagagggccacacaccacgtggaccctgcccatctctcatttcttgcctctcacttccactcgagagccagcctgcattctcactactatctctcactctctcctgccttccaggcttttcctctttcccttgctaactccggcacatcccctaggtctcaggtgaagtgtcactcccctgggaagcccctctgccctcctgttcccactcaggtatgacgtagggccctttcccatgcgctggcacttacttgccttctccacgaggctctgagcccacagctgtctctgggtgctcagtctctagcaggtgtatggcatacagtaagcacttagtaactgcttctgagatggacagatgggtatgtgcaagggtggatgggcaggtgggtatgtgtgcatggatgcatggatagaaagaaggtaggctggtgagtggatggatgggtgggtgattgtgaggtatacaggtgagtgagtggatgggtggatggatagatgggtgtgtgtgcatggatgcatggatagactgatgggtgggtgggtgggtggatggatggatggatggatgggtgggtgggtaggtgaataatagatgggtggactgttgtgtgggtggatggagaggccaggtggtctatgaggtgagtccagaggcattagaaaatggagttctaagcctttggctttccatgggccccaatttctctgtctgtaaaatggtcagctcagctcctgtgcccagcgtggaggctcaggatgagctggagagaaggtggaggcttcagcaggcagcacatcaggcgctccacagacagtgcatgggacagaacaaggttgcttggcgtccctgcagcccaagggctcccttcttcagggggacaccgatgccctcctccatccctgcttgctcccaggatccttgcccaggtagcagactgggaaccagacccatagagttcaaatctaaacgttgctgctcaccaggaaattccctttgcctcctaggccttaatggcacatctataaaatgggggtgctcgtgtattcatgttctttgcagtttctctggggatcaaaacaatgtgacgaagggaggcagagagaaaaaatgcaatgtgacagggaagatggcacctctcctgatgcccagcacacagagggtacccaggaaatatggggcttagaatctcaacacctgaaagagcagcttctgctgcagcccctgccacaggcgccacactggccacagtgctccctcctagcccttcttcccctggccaaagctacctctggaaactgagttcgaagtttccaaaccttatcccagaccccatagccatgagttataataggcacataattaataatcacgtaattataatgtctatattatttataatttgtatatttatatataatttatttaactgcatctataatctataatttaaaattacatcaggtaagtaattacttacctactatagtgcttctgccacttacaagctgtgtgactttggataagtgccctaacctctctgtgcctctgctgcctcctctatgagttaaaatgtgtagactgcttctcagaacagggcccaacacatgtctggtaggtgtgggaattagccccgaggatgctgatgacaaagcatttctgtatctgttttgctcatgggttctttgctcaaccctgcaaggtgggcatttaatcactatccctattttatgggtgaggaagcggaagcccagcaagttggggtgactcacctgaggtcacacagcgagtcagcagtgggcgtcaggtactcggtgttctttccaaagactcctgaggccctggtctggaaaaagccagctctggaccaggccggaacacaggggcctttctgaaccttcctttcaggggcctggggccgcaggggcctccggcccgtcagccaagtcttttcctcccaacatgccagccagggaacacagacagccggaccccgctctggccactgccccgccaggcccctgtgccaggacagcgtgtccgcccacccgggcagtgaccagctgttcctgaggctgtgggctggagccaggtttctgtcacttcaaggagctcctgtcttcccggccgcacctccacagccagcaaggaccagtcagggattttcctgaactttccctctgttataaaagagtatataaacatttaccttttaaaagtaacagctaacttagttgcgccctcctctgcccagcattggtctggcagctgcatgtacgttgtctcctggcatctgcgcaccatcgtctgaggtgcataatcttgtgcctgtttgcagatgaggaaactgaggcacagggaacttgagttgcctgcccaagcccccacagcaaggcagtgtctgggtggggatttggacctagacagggagcctccctaccaatcaggccttcagggcagagtcttggggcccagaaaagcccagcccagcttctggttttaaattttataacgtgttcctttgttcagatgattgaaggaaagcatattgcaggtagaaatagaatgaaaacattgtaacacatgaaaccaggagtgcctttgtgtgcagctgacccttgaacaatgtgggggttagggacgctgacccccacacagctgaaaattcatgtgtaattttttttttttttttttttgagacagggtcttgctctattgcctgagttggagtgcggtggcacaatctctgctcactgcagcctggacctcccaggctcaggtgatcctcccagctcagcctcccaagtagctgagactacaggcatgcatcaccatgcccagctaatttttgtatttttagtagaaatggggtctcatcatgtcacccaggctagtcacaaactcctgggctcatgcagtctgcccgcctccacctcccaaagtgctggaattataggtgtgagccaccatgcctggcctcatgtgtaactttcgactccccagtcaattaacacacattttgcatgttatatgtattatttactgtagtcttacaatacagtaaactaaagaaaagaaaatgttattaaaatcctaaggaggagacaatcgaatctatttactagtcatgaagtaaaagcggatcatcgtgaaggtcttcatcctcgccgtctttgtattgagtagactggggccaggagaaagggagggtcttgctgtctcgggtggtggagggggaggcaggagaggcaggcacactcggtgtaaccttttgaaaaaactatcttgggatcttggctcagttattccgatgctgagtatgctaatcacatctaattttcattgattctgagaaaaacatccacatataagtagactgtgttgttcaagggtcagtcatacctggccctggcagcagcaggtccccacacagcttagcgcttgagccagtcctggctgctgcgtcccccaaagctgtgtacccactgaggaggacgcagcctgtacaggaattcaggtttggttctccttcccctcttgggggctgtttcctcatccgtaaaatgggaggctgatccctatcttgcgcattgcaggacgcaggggagctgactcctcttggcagctgggtcttgtcccatcctactgagggggaaactgaggtcaacccaccagcctagagtcaaacagctggaaagtggcagtgccagatttgagcctgaaaccaggttattttttcagtcaccttgcctagccattcatagaagtttttaaatcttttaggagttatcacatgctcatggtagaaaaattcaaatgcaatttcctttttatacaaatgttttgtacacacttttttttttgagacaaagtctcactctgttgcccaggctggagtccagtggcgcgatctcagcttactgcagcctccacctcctgagttccagcgattcttgtgcctcagcctcctgagtagctgggattacaggtgtgtatcaccatgcccagttaatttttgtatttttatacagatggagttccaccatgttggccatcctggcctcaagtgatcatcccaccttggcctcccaaagtgctgggattataggcatgagccaccgtgcctggctcactttttttttttttttttttttttttttgagagagggtcttgctctgtcgcccagactgtgcagtggtgcagtcacagctcactgcagcctgacttcatgggctcaagcaatcctcctacctcagcttcccaagtagctgggaccgcaggcaaacaccacctcacctgcctagttcattttttttcttgtagaggtaggatctccccatgttacccaggctggtctcaaactcctatgctcaagcaatcctcctgccttagcctcccaaagtgctggcattacagtgtgagccactgcacccggccctgtacacactttctacactgcactttttttcaccaacttgaagactgctccaattaatccatgtggtgcttccattctctgagtactcagccaatagaacctcccagatgtatctccctcatcccccttggatggacagctaggggatcccgtgttttgctgctgcaaaggacattgcagttggtagccttgtgcagatgacttcgggcccaggttagagggcacatgtaatttgcatttgggtccatattgccagaaagctctccaaagaggtagtaccattttaccctcccatccccaactagattgggcacctctttccccatgccctcaccagctaggcagatgctctgtgccaagaaaaccaaacagctgcttcccttacaaatactcaagggcctgggcatgtgtgggggcctgagtccagcctgcacccgttaccaactgcaagatctcaggcaataggcttcaccccgtggggctcagtttcctcatctgtaaaacagtggtgattggattatggtgagaagtttgtagatgcaaatgcctaggacagtgcctggaacatcgaggccccaggtcagaagtggctgttcttacgagtctgcatgagtcttgtaccccatgactgcagtcatggggatgggggcccagcccctaggatggatgctcaggcctcagacctgtgttttgggaagggatgaagggaagggaagagcaatgtggggaattaccaaggggaaagggtgggattagcttatcccagcttcccactgtgccagtggggaaactgaggcccagaggggcccaggccttgaagtgattgcaagttcagcagcatgaaactgctctttatccgtgcactgctgtcaggaacaaatgctgaatggagagtccggagggttgcccaggccactgcaggacccaagctctgagactgagggcttggggacacagagccagagccttgtcctgaaatcctggagggtgctccttggacaggacaaaacttgtattctctctctgagcccagcctcagcagaacccagagtcttccagggctgagatcttgccgtaccagctgcggtcacagacctgccacactggcttgacctgggagttccttacagctgcagaacccctgtcccacctgacccgctgcatcaaaatctgcgtctcaccaggatgtacactttaatgtttgaggagcactgagactcagccaggatgatactctacctgcctgcaggtacaggccgctgctctatgggcagacctcaaccctcagccccagaatgtcctccccagctctgtcgcagacatacgtggctccctgggaggcatagaaagtacaagacttggacctggctccccatgaactggtggccctggaagttgctaccttttattgagcccctgccagctaccaagcacattatcccatttcgtcccacaacagcactgaaagtttgctgtttaatttagagtatcttgcagcttaggcacacaaagcacagagaggttaagtaaactgcccaaggtcacccagcatatacatatgcaggagctgggatatgaatccagagctgaccccggcaccagagtctagccatttacaatcagagtgggcatgggggcagatggtggctcctctcacccctgaaaccggagccccagcccctatgagccctcacagttcattggtctggctgtggtgaatctgacctctcaaaagcctccctttccggagcagaggcctgcgattctccatgctggagagcccgccaagagggattctcctacaactttccagaacacagcagttctggggccaggccaagctagctatgtacagctggaagaggctctctcccccagatgctgagtgactagaagccaagagggagggagttctggaatggtctgcagcagctggaggtgaggcctgagggggctggggcggggcctgggaagaggggccagtgcacagagtattctgaaccgcagaaagtattctgttcactctgggagaaaaacaagagtgttgttcaaaacagctggacgccaggcccagttgccctcgcctggtttttactcttaaacaccttcgcatttcatggctgttccaaagagagagaaatcagccagttgtccattcagacacaagacaaggcatcagccgacaaccaaaggcaaatattttccgtggtgaggaaagcctcccgggtggccccaggcctgcctctggagcagtggctggctggtggctggctctccccgaaggtcgctgcttctggtcagcagactgcgtgtctgggggactggccaggatccgcacccacccagggagcgctgggggcagcggggcggccatcctaggcccgtagtaaatggaagctcccttcctggcatgagagcagccaggcctccagggaggccaggacagcgtgggccccacagttccctgtcttgaaaccccagcccttgatatcaaaatgggacctgttagtctgttgtcggggagggggatttaactgcccaaagctcttaggccctgagtgaatttttttcagcacaacagtagctacacacagttgaagagtgtggcacatggctacatagggtttgtatttggtctacagatgaaggaacaagacccatgtggacttaggcctcattatcataattctgcagccccaggagccaaatccccacatggaaacccttagtaggtagcctggccaagtgggtagcgggaaatcagtgatggtaggccctgggacttctctctagtcccctccccaccctttttttttttttttttttttaatagacggagtctcgcccttgcccaggctggagtgcagtggcgcgatcttggctcactgcaggctccgccccccggggttcacgccattctcctgcctcagcctcctgcatagctgggactgcaggcacccgccacctcgcccggctaattttttgtatttttagtagagacggggtttcaccgtgttagccaggatggtctcgatctcctgacctcatgatccgcctgcctcggcctcccaaagtgctcggattacaggagtgagccactccacccaggcttttttttaagacaagagttttactcttgtccccaggctggagtgcaatggcgcaatcttggctcactgcaacctccgcctcccaggttcaagcaattctcatgcctcagcctcccgagtagctggaattacaggcgcatgctaccatgtcaagttaatttttatatttttagtagagacggggtttcaacatgtttgccaggctggtctcaaactcctgacttcaagtgatccacccaccttggcctcccaaagtgctaggattacaggcgtgaggcatcgcacccggccacccaccctttttttctcccaagaaaaccagttttctgaaattttcagggggaaccaggacctcctcgcccatgtctttcacccctgggtgcctgtatcctgtattcaccaaagccccacgggcatctccccgattgaggtcccacccctcagggcctaggacagggggaccagggagggcccccagaggctggagtttggaatacccccttctcttctctggagctcagtttgcatgtctgtgaaatgacaggtgatgtcacctcccagaagggcagtttgagagaagtaaaatctattgaggcaccttggacacaggagggggtcagacggcatcagcctttgagggtgctgcagttacacggctccagcagtctgagccttatcaagacctttccagatatgagggaagtccatgcccagtgtctagctggctgggggagaagccccttgagaacccccactctgtaatgctaggctctgcatttgcttaggaggctgtgtccctgtctctccccttctgggccagccttgctttctgggcaggcccaggagtgtcccgggcccagcactcagagtcagcgctgtctttaatctgtattccacaggcatcctcaccccctcccctcccaggagctaggaacctgccaggcttcttacctctctgctggaatctccaccccccaccagaggctgccctcttggggaaggggcccagcccttgaggcctgtctcctccagactagctaaaccacagagagaactccatctcaggttcccaaataggcggtattcttccccgccaccaagctaggcagctcctggcggctggaatgccctgctcctttctcagcccaccacttcctccaaccttccgtcctctgtgctgcagcagggagtcttaccccacctccttcaggagggaggtgctcacgggttcctatgcctgtgggtctccaggattgggcacggagcagtctgcaaaatgtcaagtgagggagagatccagtcaaagccccaggggggcctctgagctcagtcagctcctctgctgctccccacctcttgggggaaggacaggctggggtttgcatgggtggccttttggagagcagagtaatgggagcctacttgaacttcctgcggcctcattccctgactgggggcggagggtagtctgagctgctggcctggggtgcttggccgcaggggaaggggctgggagggaggggtctgggtgagtctaagggagggtgagcctgaaaaggggacggcagcactaaactgccttcggggagtccccactgtgcgcccctggcactttcccagtcccctggcgcggtcgcaggcacgggtggggtctgcctcaaagttgttggtacggccagcccgctgctgtttaaatggtgtgtttgtttagagcggcttagggagggaactggaaatggggggcgggggcagcgccccacttggcgccaccgctgccggagggtctgcgtgttagaagccccagcttcgtaaatgaccgaagaagggtgggcgttgaggagggaaggccgaaaaccaacggagggctcggggccccgggccggccgccccctttttgcggggggagagcaggagccgcctctcgcagccactctgcgcgcggggtgggagggagagagggaggcgaagggacgacagcgccgggctccccgcccccatcccacccggttccaatatttcgcagaaaggcacgcggctcctaatcggtcttttccaggctgagatttagccgtgcgatgcccgcgcaggggcgggggccgcgggccaggggaggcgctcagagtccggagccgccgagcgaggtgaggagcccgcgtcctcggctggtggagcgggcgggcgggcgcgcaaacccgagaggcagatatagaaaggggggcaggttaaaaataaccctctccggctgggaagctcgcgcgcgctctctcgcctcgttcggtgccagaggactccaggggaggtggcgttggggagggcagagcgggattccccctcctccgccgggcggggtgcccgcctgcgcgccgcggttgcacgtgtgcggggccgcgcgcccgggccccctctgcacccggtcggtgggtgccccctccccaggaccgggcgcatctggcagtggccccccgcccgcagccttgcgcggctggagggaagcgctccattattcattatttacgagcgttaataggtttgagccacgggggcggggggttgggggggcgacgaggacccagtggggaccgaagcattagaagaagggatagggagggagggggaagggcgggggcggggctgtgccgcggcctggaggaagaggtctcggcctggggcccggcgagccgggcgcacctctccgtcaggtttctccacaccgccggccgtcgaggctgctcagggcgccaagagggcagcacgggccttagattttgctctcggcctctgtccttcgcgtcctcgcccttaccgaggcgtggggagggagctgcggaggccgtacgccccgccctgcgcgccccttgccgccgccgcgtccccgcggcagccccggcctcatttatcatcatctttggtcaagtggagtgtgcaaggaacagctgcttcactcggctgacttcgagggcggctacgggagaatcagggagatgaatgatgggggctggtggcagccccccgcggtccccgcgcaggcgagagggaggcggggacgtccagggccgcctccgcctcatggcgagtgcagcgcccccttcctctctcctggcgcctgcagcgaccggggaccgggggaccggggcaccgaggaccgggcccgccccgggaggggactgggcgcggggacgggggggcgcccttcgccggcggagaactggcgggcgcgctgccggcagagcccgaggttgccgtgaccttgctggggtcagcgggctgggctgcggaggcggcggcgcggcgtctttggtgcgctttccggattggcgcagaggccgggaaacaaggcgggggcgggcgggggaacacaaatagaaggtgaaattttacctgcccctgagggagtcctgcggattttctccggcagcagcaggcgctctgcctttgtcttacacggctgaaacatctgttgcagaggggcggagaggccgcaacaacccccacacaccctgcgctgctccccgtccccctctgccccagccgggctgcaggactccaggcgccgcgttaaccctgctcgcgctggggcgcgcgcccgcactcgctgccgcagtccagcgcctcgcgtggggctcctcgcccccgccccggatctggtcctggccggggcgcccggtgacccccctccacctcgatggggtgctgaggtgtaggcggggggcgggggcggaaagggttaatggcctagtcgcagaccctaattgtcagagccggccccgcttcgtttcaattaccctaagtagagactgaatgcgcaattaacgaagtcagcttgccaactggaaagccggccccgctttcacgttgagcagaatactccaccagctgacttggacgaagcaatttcctcctctctctctccccttttttctctccttctctcttccaatccccctccctctttttctctctccttaataataaaattataccaagcagtttgcggtgtggcaggcggccagaaaagcgtttctttaaacgccgccgtctcacaattaggcagcaagaggatttgacacgccgtggcggcctgacaggcggcttcctcccctggggactggggggagggagggggtgccaattccccgctcccccaggtggaacggggactgggaggggctggcctgctgtgcctccccggctgtcagaatggctgcagcgagggggtgtcaaaggcagggaagcgaggggcggttccgcctaggctggggaaggcggaaggcagcggcacattccacgactcctctgggaagctggcgtatccaggagggagaccttgttcccctttctgtttgacagacaggcactctggggcatagagctgtagacggatctcagccctgctgggcgtcctgcacaagccactggcccactctgggcttcttccattaatccctcggcaaaatgagggggagatttgacctagaatgtgctctgcaaaaagtgtcttcccgtggctcgttgcccttaacagctggtcttgtaggccaggagagggggggtgtaggcagcaccacgtagaagcaagccggagacccctatgccgtttgggtggcagacccatgggcctcaaggcacacaggagggtggctcggcggggagccatgatgcaggcagctaatagatggggtgactttgcaggattgccagggattggtgccatgaggacagaggatactgaacactagctgcagcagccgggccacttgagctcggggaaggcccagagaatttggcagaggtgggaggtaactgcaggggtccccatttgctctttgcagccccccagtcccacccaggctgctgcttacatggggtgccttcatccttccccacatagttaagcccttcttccagccttccctgatcacctcctctccccacccccatgggcccctgggtgtcactacatctcaacaccaccagggcagttgtatgtgtgtctgcctgcctctggagagcaagggccatgtgctgtttcctgtgtgtctccggcacccagctcggcccacatccagactgtaagctgagcagaaatgtgctccacaggtgaaccagtgcaggcactaggggctctggaggagacagcacacactttgtctctccttcctgattggctgttgcatgcatcctggcctccaggcccctcatcctcaaacctgtctctgggtatcatccctttggtctgtgttgggggttaaatgcactcaacacagaacccagcaccccaatccatctcatctgtttatttatccaagtaatactgaagggacatcgactctggggccagtttctgggtttggagcttagggtcaaacagaggaagtctctgccctcctcaggctacgttctagtgagggaggcacatgtgaaacagctcattgtaccatcaattatgtaattaccgctgccatgagagccaccaaggagcctggcgggggacccaggagagttggggtggcgcctcgcccggtgtctggtgtggaatgccacagaggttctcaccgcctctggaagcctccagcctttccagtccccctcctctctgcacctcctttccaaggccgctgagtgcacctcctgcacgggtctgccctgcctcccccctgagcccagggcactcgcctttctgctctcctgcgttgctctgcttatctgtgctggtcccagagcttctgctgggcccgtgagcactgttcctcctgctctgggtgccatcgagcccatgcagatcccctttgcatcggttctgtcagcatttgaccccaggagcttgtgatcaaattcaggccacagacagtgtctcttgaattctcaagtatgaaagaaaaaactttgtacttggttgataatattttcttaaatgagagctgtccctttttgtaaaatcctgatttctgtctttttcaagggaaaagctcagaagctttggcaccctggcctcccactcccaagtggccgcagtccgctggtgctgagaggggctgctgctgcccctccccccccactttatttgggagcaggatcgccagtttgtctccatacccacctgcccacttccctgccaggcctcgggaagatgttctttgtcaaatgaagcaaagcagtggccacccctgatctcccgctgcctggcccacccacatgtgctctgtgtcgccactccactgctctttctggatattttcacagagttactgtgacattttgtgcattattgattcagtaaatatttattgttctggacaatggggagtagctgtgaacaaaacaggcagaaatccttgctctcatggaacttttgttctaaagaggagaccaataataaagcaagtcaagtttgattacaacaaggtcagtcgtgggggtgcaaggggtgctgtttcaaacagtggtcagggaaggcttattgagaaggtgacagaggtgacagaggagccaagacttggagccagggtagaagctgtgtagttatctgggagtggtatttccagaggtaaaaggcttgcccaaggtcacacagtcagccagcagtcagacaaacctgcagacacttgacacctctgtgtttccacttccccagggaagtaagtcatggaccctctgggcatgtggggtagggaggacaaggctggggccagacagtcctgtgccttcccttagcagccaggccaggagtggtggctcacgcctgtaatcccagcactttgggaggctgaggtgggcggatcacctgaggtcgggagctcgagaccagcctgaccaatatggagaaaccctgtctctactaaaaatacaaaattagctgggcgttgtggcacatgcctgtaatcccagctacccgggaggcggaggttgtggtgagcccagatcgcgccattacactctagcctaggcaacaggagggaaactctgtctcaaaaaaacaaacaaacaaacaaaaaaactagcagtcacacctagcctatctcatccttatcatgcagcctcctacaagggcaggcactcctggggcttggggtggggagaatggagctggctgggagcacctctgtgggtcccatctgacccctgtgccagggtctgggccagccccttggtcttgctaggcccaggactgattgtgtctgatggcatcagcctggcctcgtgggggaaggacaggggctgtgtcccccagcaggacccagacaactgcctgggccaccagacccttgccctgttaactgtctgcgacccagcaatcagcaccccccaccctttttcccttttcttcattttgacagagacacagagaggtggtgacgctttttgttcagtggtgaataaagtgatctaaaaaaaaaattattgtccacaagagactgatcagtacagaactgataataggtgagctcctcccggcagccttccctggggggcctaggaatgcctgcagctgctgtggaatcccatgttgctcccccacacctcacagtggaggtgggactgctggccatctgcccctcgtccctggactgtgggccctgcggcccaggtctcccggcctcttgatagctgtatcccaggaatcggcaccaaggatcggtggggtgggagtggagagcagggcacagctttagagttaggggacctgggcacctaggcagggggcctggctgtgcccatgaacagcaggtggggccaggccagcgggtgggcgtggttaggccctgcagggatcccattcagctggcttagcaggtctcagctgtccccacagctgggtccctggaggagatggtgttgggggctgtgaggggaggctcctcaaacatctggagagtccagatacctctgcactctgaagggcccagagcccccagccacaccagggctcccccaacctcaactgagcctggctagggctgcccttctgcttctcaccccatcactggcatcctgatatttgggacccccagaccctatagagagggtatgttggtcaccccgtgggattcttccttgagcatgggggggccatgaatgaggagggatgcatatccaagcgttgcccacagggagtggtctggaggggctgcctggtcctctggggttcctgatgtcctaggagggtcctccatctgcccgaagcaggcctctcagcccgtggaccctaacctgtcccagaagcctatgggcacccaacctcttgtcttgtgggctccttggaaactcgcccccttcctcccattcaagccaggcccctaggatatggaattgagcccatacgatagcagtgaatctggcgaacgatttctcattttcaccaagtctcctgtattgattattcatcacccacaacagatggggaggcctgaggagttccaccttctccacccctgcctggactcctcctctgccctgtcctcagcttctggagccctggtacactgctccttcattctcaggttcccaggccttgagtgggttgggtttttaaatttttttcttgcagctacaaatcatgaaaacaggtcataaaaccaccttgggtaagtaggtgggatggaaccagtggcctcagagctgctgctggggatcaggaagcccccagtccgtttctttctccctctctccctgcctcccctcagcctccctctctccctttctcttaggaaaaaattccagccaccacctcccagctgggctccctcaggagccacagcagctctggcctacactgtgcccatttcgctgactggggcctcaagcctggggtctgaggaggctttaggcctagtgacctctccctgaggctgcccaggggacagtagttgccttggtgacagtgggtggctggtgaccatcactgcccattagtggacccacccgaggtgggtctggctgcttaaagatgaggacagaataaaaaagtgaggaccctggcctgaggctcaggctgtcacaggctgcagctcagccccttgccccacagcagctttggcttgcatcctgctccaagagactgttcctccaaagtgggagcccctcacgggggctcaggacaggggtgtccacccgtggtccagtcactgccgctgctgctgagggcgtcctgcataggagcttccctgcgggtgggctctgctctggggtcctaagcagggcacttgtcctgaacctcacttttttctgtaaagggggaggagagattaatcaaaccgttgttcaagaaagccgcacagagtaggtgttctgcagccgccttgctcccgcctcagcagtcctatagatttctggagggaaagggctgaggtctttgcctaaaagaagggctgtgccccaggtgtgtgccacactgccgaaggcctgtgagagccgctggccttgcaccgtagggtagctggggtttcgttgtgcccccactatgttcatggcttggagtgaggacacccattgctgtgtcaaggggaatcctgatgccctgggtgctatgtgattccagctcatgctccctgctgtgcctggcctgcctcctctgtccagcgctgagaagactaagttccaggatctgattctaagggtgaagtgttcatgtatctggtgcttagaggatgcactagactccgctcctcctgccttctagtttcagcaagaactttggagataaggcctggaccaagtgtctgagaggagaggcaggttggggagaaacggatggatgggaatgagtggggaccgtccgggcagtgtggttgagctggaccatgaggagtgagcccagtgggtggggggtgccctcccttgtcccctctcaccaccccttctccctccagcccaagccacaggccaaacccacaatctgcctgctaggccacttcttccctgcccccaggttcaaaggtcaccatcgttctgccggggccagggaggggggtgctctttctgccccctcctctcctgaggcctgcccagcccaacccaacccagcccagccctgctgcctgcctcgccttctgtgtcctgtcctagtgctcttgaaaagtaatcataatcataataattaataacaacagagcccatagcaggcctgaggcagcccttaaagaggcagtgcccccttttctcccagcagagctggcagtgggacctggctggcactgagaggcggcctgtgcctttgttcccatccctccctttgccttgggttccagggtggtgttggggcgagcatttttgcctgcattctccatcagcactgggcttctcgtgttttaattgaactgtcttttcttagcaatagatgctttcaccgcatccagctgctcgtgtgtattgggaaacctgcctgtaatacagctcggctaaattaaaagacacagcagctggaccaattaaacagggagggaggaatgcagacggacaggcagggagggggtactggtaatagcaccccctcactgtctctgtctctctttaaataatgtttctggtaatgcattttggagaatgtgaaaaaaaataaaaaataaagccgtagaaatgttaatgatatccacaggacactcagcaggaaatgagagtgatctgggactaataaaagccgaaatgtaatttgtgcagatatacgaggcgcagccttcagagtggtcctgggtttgcacattctgggctcataaacatgcgcctggggagggcagggagcgggcgctgtgccctcggcctgggcacaggcccgcctgggctgccctgtggcagtctggccagggcaggagcgtgaggctgcccacctggcagggagctgccagaccagaaccaagtgccgtccccagctcctctgggttggcgcgtcgcagcaggaacctcctgtaatgttttatccaagctgccaggggtaggattgaagtgggtcagaagggtgggcacgctgcttgttagggatgcctgcgacaaatccagggagaggagctggagcagagggaaagcggctttgataagccggtgggcaggggctcgcctcgtgggaaagtggccggcccccacactgggctgactctcctgcatttgtgggccagggcaagctgactccagagagcaggagaggtggtcccaggactgggctgacgggcttctgggggccatctggctgccctgggcttgccctgctctcaggcagatggaggccctctgtcgccttccctgcatccatccccagacactaaatgaggaaggcacttgtggtggggtccgggccaaggaagaagggtaaatggagcagcacccccagctctcccccactccccacctttctgcctcttccctgtgcccctccccgactctgcgtgcctctccctctctgtgcccctctccccctctctttgtcccttcctgaccccttcaacaacctggaatctttgtagcctgaggcaagccaccccttccttttggagcatttgggaaccagcactggaaagtcccctatcccctcctgggggcctgggccacacaggccgagctgagcccctttcttcctgcctccgggccagcatggttctgggtaaatcccaaaccctctgggactcggccaatggccagcccctccatgcacttcctccaaaacctggggcattcctctttcttccatccctctttgaggggtcttctggttggccaggccagcgagtcagctggaggaacctttaccctggatgctgggctgtcagatgctctgctctgagaggctcccgcaacccaccctgggtcctttcctgacccaggattctgctctgcaggcaggggcaggttagacccctgcctgagccccatcccctaaaatcataaccagatgggctcttgagtgttgcctgccccagccctcacctgctgaggtggggaggaactggccaggaggggacagggctgtgtcgccccatgtgggtggggctgggctgtgcccttccgtggccgtggccctgggactgcatctctactcccattagtatgcactccctcactctgggccacgtaatctgtttatgcacgtatgatatcaaaaacaggaggcaggtgctgccgtcttgcgttcctgggagtcagaggaggggacattttatgtctacagtggcttggcagcccctaatcgatgtctgctagaaggaacagacagattccagatggcgtggcagtgatagaggaggtgtgtgtgtgcatgcgtgtgtgtgtgtgtgcgcgcgtgtgtgtgtgagcatacatatgcttgtgtgcacgcatgtgcgtggggacaggggcagaccctcctcagtccccagcatggctgggtcatgcttgaacacggtcgcgaagggactaaattacaggatccagcaggccccaggggatgagggagcgggaattgctctgctaaatgcttttgagctgtcaggaagggctgggagtgatgggtgggggacattggggaggagctggcaatgggcggggggggggcgggtagctccccagtgacctggcgctgggcagccggttttgcctcccgcatcagtggccgtccttggcaagactcagctgcaggcgatgtgggagcgggaattacagagcacacctccctgacacagaagttgtcaatatgcgcacagctggtggggaggctcaggcgaaggggggactattaagagctgcgcgggggagcaggcagggtggggaggtgggtgggagggtgctttctgaggcaaaaggaagtggcccgtctgaatcgctcatcctctgccccctccctgcccatcctcccctccctccttccctccctccctcccttcctttttcttttcacagataaccagcccgagtcatgcagtcttttcgagaaaggtgtggtttccatggcaaacaacagaactaccagcagacctcgcaggaaacatcacgcctagagaattacaggcagccgagtcaggccgggctaagctgcgaccggcagcggctgctcgccaaggactattataacccgcagccttacccgagctatgagggtggcgctggcacgccctctggcactgcagccgcggtggccgccgacaagtaccaccgaggcagcaaggccctgcccacacagcaaggcctgcaggggaggccggctttccctggctacggcgtccaggacagcagcccctacccaggccgctatgctggtgaggagagccttcaggcttggggggccccacagccaccacccccacagccgcagccactacctgcaggggtggccaagtatgatgagaacttgatgaaaaagacagcagtgccccccagcaggcagtatgcagagcagggcgcccaggtgccctttcggactcactccctgcacgtccagcagccaccgccgccccagcagcccctggcataccccaagctccaaaggcagaagctgcagaacgacattgcctcccctctgcccttcccccagggtacccactttcctcagcattcccagtccttccccacctcctccacctactcctcctctgtccagggtggtgggcagggggcccactcctataagagttgcacagcaccgactgcccagccccatgacaggccgctgactgccagctccagcctggccccggggcagcgggtccagaatcttcatgcctaccagtcgggccgcctcagctatgaccagcagcagcagcagcagcagcagcagcagcagcagcagcaagcccttcagagccggcaccatgcccaggaaaccctccattaccaaaacctcgccaagtatcagcactacgggcagcaaggccagggctactgccagccggacgcagccgtccggaccccagagcagtactaccagaccttcagccccagctccagccactcacccgcccgctccgtgggccgctcaccttcctacagttccacaccgtcgccgctgatgccaaacctggagaactttccctacagccagcagccgctcagcaccggggccttccccgcagggatcactgaccacagccacttcatgcccctgctcaatccctccccaacggatgccaccagctctgtggacacccaggctggcaactgcaagccccttcagaaggacaagctccctgagaacctgctgtcggatctcagcctgcagagcctcacggcgctgacctcacaggtggagaacatctccaacaccgtccagcagctgctgctctccaaggctgctgtgccgcagaagaaaggtgtcaagaacctcgtgtccaggaccccagagcagcataaaagccagcactgcagccccgaagggagcggctactcagccgagcccgcaggcacaccgctgtcagagccgccgagcagcacgccacagtccacgcatgcggagccgcaggaggccgactacctgagcggctccgaggacccactggagcgcagcttcctctactgcaaccaggcccgtggcagccctgccagggtcaacagcaactcgaaggccaagcccgagtccgtgtccacctgttctgtgacctctcctgacgacatgtccaccaaatctgacgactccttccagagcctacacggcagtctgccgctcgacagcttctccaagttcgtggcgggtgagcgggactgtccgcggctgctgctcagcgccctggcacaggaggacctggcctccgagatcctggggctgcaggaagccatcggtgagaaggccgacaaagcttgggctgaagcacccagcctggtcaaggacagcagcaagccacccttctcgctggagaaccacagcgcctgcctggactctgtggccaagagtgcgtggccccggcctggggagccggaggccctgcccgactccttgcagctggacaagggcggcaatgccaaggacttcagcccagggctgtttgaagacccttccgtggccttcgctacgcctgaccccaaaaagacaactggtcctctctcctttggtaccaagcccacccttggggttcctgctccagaccccactacagcagcttttgactgtttcccggacacaaccgctgccagctcagcggacagcgccaacccctttgcctggccagaggaaaacctgggggatgcttgtcccaggtggggattgcaccctggcgagcttaccaagggcctggagcagggtgggaaggcctcagatggcatcagcaaaggggacacccatgaggcttcggcctgcctgggcttccaggaggaggacccccctggggagaaggtggcctcgttgcccggggacttcaagcaggaggaggtgggtggggtgaaggaggaggcaggtgggctgctgcagtgccccgaggtggccaaggctgaccggtggctggaggacagccggcactgctgttccaccgccgacttcggggacctcccactgctgccacccaccagcaggaaggaggacctggaagctgaggaggagtactcctccctatgtgagctcctgggcagccccgagcagaggcctggcatgcaggacccgctgtcacccaaggccccactcatctgcaccaaggaggaggtggaggaggtgctggactccaaggccggctggggctctccgtgccacctctcaggggagtccgtcatcctgctgggccctacagtgggcaccgagtcaaaggtccagagctggtttgagtcctctctgtcacacatgaagccaggtgaagaggggcctgatggggagcgagctccaggggattccaccacctcggacgcctctctggcccagaagcccaacaagcctgctgtgcccgaggcgcccatcgcaaagaaagagcctgtgccacggggcaaaagcttacggagccgtcgggtgcaccgggggctgcccgaggccgaggactccccatgcagggcaccagtgctgcccaaagacctcttgctccctgaatcctgcacagggcccccccagggacagatggaaggggctggagccccaggccggggggcctcggaagggctccccaggatgtgtactcgttctctcacggccctgagtgagccccgcacgcccggacccccaggcctgaccaccacccctgcacccccagacaaactggggggcaagcagcgagccgccttcaagtcgggcaagcgggtggggaagccctcacccaaggctgcctccagccccagcaacccggccgccctgcctgtggcctccgacagcagcccgatgggctccaagaccaaggagacagactcacccagcacgcctggcaaggaccagcgctccatgatccttcggtcacgcaccaaaacccaggagatcttccactccaagcggcggaggccctctgagggccggctccccaactgccgtgccaccaagaagctcctcgacaacagccacttgcccgccacattcaaggtctccagcagcccccagaaggagggcagggtgagccagcgggcaagggtccccaaacctggtgcaggcagcaagctctctgaccggcccctccatgcgctcaaaaggaagtcggccttcatggcgccggtccccaccaagaagcggaacctggtcttgcggagccgcagcagcagcagcagcaacgccagtggcaatgggggagatgggaaggaggagaggcctgagggttcccccaccctcttcaagaggatgtcttctcccaagaaagccaagcccaccaagggcaatggcgagcctgccacaaagctcccacccccggagacccccgatgcctgcctcaagctcgcctctcgggcagccttccagggggccatgaagaccaaggtgctgccaccccggaagggccggggcctgaagctggaagccatcgtgcagaagatcacctcgcccagcctcaagaagttcgcatgtaaagcgccaggggcctctcctggtaatcctctgagcccatccctttccgacaaagaccgtgggctcaagggtgctgggggcagcccagtgggggtggaagaaggcctggtaaatgtgggcaccgggcagaagctcccaacttctggggctgatccgttatgcagaaatccaaccaacagatccttaaaaggcaaactcatgaacagtaagaaactgtcttctactgactgtttcaaaaccgaggccttcacatccccggaggccctgcagcctggggggactgccctggcgcctaagaagaggagccggaaaggccgggcaggggcccatggactctccaaaggcccgctggagaagcggccctatcttggcccggctctgctcctgactccccgagacagggccagtggcacacaaggggccagtgaggacaactctggtggaggaggcaagaagccaaagatggaggagctgggcctggcctcccagcccccggagggcaggccctgccagccccagacaagggcacagaaacagccaggccacaccaactacagcagctattccaagcggaagcgcctcactcggggccgggccaagaacaccacctcttcaccctgtaaggggcgtgccaagcgacgacgacagcagcaggtgctgcccctggatcccgcagagcctgaaatccgcctcaagtacatttcctcttgcaagcggctgaggtcagacagccggacccccgccttctcacccttcgtgcgggtggagaagcgagacgcgttcaccaccatatgcactgttgtcaactcccctggagatgcgcccaagccccacaggaagccttcctcctctgcctcctcttcctcatcctcgtcctcgttctccttggatgcagccggggcctccctggccacactccctggaggctccatcctgcagccgcggccctccttgcccctctcctccacgatgcacttggggcctgtggtttccaaggccctgagtacctcttgccttgtttgctgcctctgccaaaacccggccaacttcaaggaccttggggacctctgtgggccctactaccctgaacactgcctccccaaaaagaagccaaaactcaaggagaaggtgcggccagaaggcacctgtgaggaggcctcgctgccgcttgagagaacactcaaaggtcccgagtgtgcagctgccgccactgccgggaagccccccaggcctgacggcccagctgacccggccaagcagggcccactgcgcaccagtgcccggggcctgtcccggaggctgcagagctgctactgctgtgatggccgggaggatgggggcgaggaggcagccccagccgacaagggtcgcaaacatgagtgcagcaaggaggctccggcagagcccggcggggaggcccaggagcactgggtgcatgaggcctgtgccgtgtggaccggcggcgtctacctggtggccgggaagctctttgggctgcaggaggccatgaaggtggccgtggacatggtaagaggccagcccagccagggtggggagtgtggggttccaaaggacaggcaggcaggcagtcggggagccccttgtttctagtgctacagtgtgggccaaatgtgtctgcagtctcgggacaatctgcagagtcctgagcctctctggggtgtgtgggggaagtggaggcacccatctggctaaggcaggtcacactcacctaccctgtcccaggagacttcccgccggggcccgtatgcccagccaccgccactctcccactcacctggcatcttcaggctccagccccacccagaatccactgggcccctccccatgctgtcaccggagatgccaaggcccagagaacacgaggactcccaagattgaacatcagggctgccccgggcggtgcaagagcaagttgcccaccctctgttcctgtctccattgcctctgggatgaagctaagggctcaggaagaccctctctggcgacacaggcttggtgcatggacccagtcacagggttcctccctctgcaggacagtccatggggtcacacagtcacaacaggcagggcggggcagatccagaccctctcaccattggctctgagaccagctttggaagccatagtcactgagcaccaacatgagagagggaactctggggctgtgccgccatgcacctttggggctgtgacctgccctctctgtgcctccgtcccctcgcccctaacgtgggtatgagggtgcccatggaggaggggtcgggagggttaaaaggtgggcacctctgagcccaccgagcacagcagccctgtgatagtcagtgcagaggggcctggtggctctggtgacagcagggtgacgttcttcgtggtgtcaccacttccccagtaccatagagtacctctgtgcccttctgagggaggggtcagtgggggcggtggggtgcacctctcccccggggccatgcttctgcccccacattcaaccccgactccactgcctcatccagacttccgtggagtgacgctcccggctctcagcgctgtgtggtggctctcagtggggacgcctgcagccttctctggcccctgccctgagtcccatcccctccactccttccttcaacccactatgtgcggctgaggtcacaggggagccagaggggcttggcaggggtctccagaggccctggacaaacactgcctgcatctgagtgattcagtgacccagcacagtggccccagccggtggcttcgcccctccccctgcccagcctcctcccccgtcgctgcactgcccacctgctcctcgcagtacacccctgcagcccctctgagcagcccctgctcctgacagttgccgtggcattgcctggccaaaccaaggtcccggtgggggcccactgtgtttgccacccacgcctcctagtgtgtgtcttgggcacctgcttcccactgcccatggggatggctggagaccttctccacgcccagacgccctgcccacctcactccaccctccacctcagaggaaggctggccccgacaggactcctgcaggttcctggtgccgcgggccttgcttacccagcagatggtggccttgggcctcttccctctccccttcccagttagtgattttttgcctctctcctgctttctgtctctctctgtctctctctctctctctctctctctctctctctctctctctctctctcattactggctccttcccagcgccttgaaacaggttcaagtctctcccgtcatcaaaaaataataaccctcagatcaccagccccagctggctgccacctcccctgcttcacagccccattcctgaaagccttgtccccacggcatcctcggtcccgcagcctcaccaggggctccccgacactcacgtcccaccaggctgagatcaggtcgtctccacatcccctgcagccagcactggccggccgaagggaggaggggtcagccccgagcaccgaccaccccatcctgtccctggcccatgggtgtcttaaccgcccatgcacacacaaggtcctgctggactgaggagacagtgtgtgttggagaggcgctagcttccctacaccacgcgggggctggaacttgccagcccagcccatgcctgtctgctgtgccatgctccagaaatggcctgacagcctgcgcaactagggctgccccgggaaggtcggaaccaggaacaccctgccagacagatgggacatcctgggagaatgggcagagtctggggcttcccagggtcacttttggctcaccaccccttcctgcctcagtggcttgggggcgccatgctccttggagtgagaccctggttcaaatcccagctctgccgagggctggttccatagctccaggcgagtcacgcatgctctgagaactccacaatgtcaaaccccgttagcaggattgtggggttctgtggatcatgtgggacctgcctggcatgtggaaggggcttggggtgcagctgtgtccctggccccagcactgccacacccctcggtaccttgacctcacttttgcgctctggagggcagaacctctgagccagctctcagggataccttttttcctcgatggccttttctgggaactgccctcgcctgctatctctgagccctgcctgcccttcccccaaagccatcatagacccctacctcctatccagatggagcctggccatggaatgcttggggtgagagggacccatagcgggctccgggcattgttagggggctaggtggtgtctgcagaggccccacctgtggcagggtttacatgccgccacccctgccctcctcttgggtagctggggtcagaagggcctgaggcctcactctctctgcatcttagtttcttcacatctaaaatgctattcatatgcctgcctgagggtggttggggcctccgtgcagtaagtggagagaagccttcagccagaggacccccatatgcttaaacatccagacaccaagggccactcacagacagcagccggcttgtgtttcgtcatcccttttgggtcaggaactggggacgctggactccagatctccaggaggccatcccagactaggcgggaaggaggcctcagccctgagctgaaaacctgaaattctagaataaaccccaggccccactcccagcatgggcagcggggaggggagtgttctgacatttctcagctgctgtggttgggatggtgcgcccaccctgagcatgtggggtcctgtgggcccctactccagcctggaggcagctgcaggggtcagagaccagcctggagccctcgggcaggttactcagcctcagctctcattggtaacccaggtaaaataacagtaatcccatcataaggttgctgtgggcatgaggcttccagccatgcctggcacataggaagctattgtcgtttgtttcactggcttcgcacttgggcagaggccgccgccctctctgctgccttctctacctcaccccccgcccccagcacggtggcactgtggctctggcgcctggtgacttctccctccccggcctcaggtttgcttcactcttccaagggccttcttggtgtgactgtcctgtcctggccacgtccactccaagcagctggtccaggtgtggggcagcccccaagctcagcagaggacagttttgagacttagaggaggacggcatcagatttacatgaagtcagccatctcaagggattaccacgtcaccgcctcctctcacaggtctgagagctggtcccctggagggtgcaggtctcatcctaggtagaacagtcccagcctagcttcaaagtgctcctgctgccagaaagggtagaaaaccatgctgaatgccttcactgttgcctggaatgggagcctcagtttcaccatctgtaaagtgagattaatgaaagggacccacagagggctgttagagccagtaggcggccaggcgcggtggctcacgcctgtaatcccagcactttgggaggctgaggtgggcggatcacgaggtcaggagatcgagaccatcctggctaacacggagaaaccccgtctctactaaaaatacaaaaaattagcctggcgtggtggcgggcacctgtagtcccagctactggggaggctgaggcaggagaatggcgtgaacccgggaggcggagcttgcagtgagccaagattgtgccactgctctctagcctgggcaacagagcaagactccatctcaaaagcaaaagaaaaaagagccagtaggccaggcgctatgtcttacacctgtaatcccagcactttgggaggcctaggcaggcagatcacctgaggtcgggagttcgagaccagcctggccgacacagtgaaactccgtctctactaaaaatacaaaaattagctgggcatggcagcacatgcctgtaatcccagctactcgggaggctaaggcaggagaatcacttgaacacaggaggcagcggttgccgtgagcggagatcacaccattgcactccagccccggggggacagagtgaaattctgtctcaaaaaaaaaaaaaaaaaaaaaaagcaagccagtgggcaaggacacacaccacgcccagcacaccagaagcatgcagcagatgctggctggtagccacagccatggtagtaactggcatcactggcccaagggggtctccctacccaatgtaccagcccagagggtgctaaatgacccatgtttgtgggcatgtgtaccccagtgctgaacctccttctggtagattttcaagcaccattttggagaagggaggcagggaccacagggggccagccagcctgtacaggttttttgtgttttttttgtttgtttgtttgtttgttttttgaggcagggtctcactcttgcccaggctggagtacaggcagtggcgtcatctcggctcactgcagcctcaacctcccaggctgcagcaatcctcccacctcaccttcctgagtagctgggactacaggcacacaccaccaaccctcactattttttgtagagacagtttcaccatgttgcccaggctggtatcaaactcctggactcaggcgatcctcccaccttggcctcccagagtgctgggattacaggcatgagccactgcacctggcctaccagcctgtaaagcttgagggctgggctccaactggagactcacctgcctttcctttctcttcatcagatgtgttccagctgccaagaagccggggccaccattgggtgctgccacaaaggatgcctccacacctaccactacccgtgtgccagcgatgcaggtacgagcccgcccaggaacaggagggcattggagcccatccaagcagtccagggggaccctccctgggcacagctccccaaacccaggccccatctcactcttcagtttccctcctctcttgccccagcaattcttttatccttctgtctgcctagacctctgctgggcaatgccagggacatggaaatgaggcattccccaggcacctgcttgaggagtgcccagagcagtgagggaagatagaagcataaattacaatgtggaatgctgtctgcggagccatcattgccaaggggcagggaggatctcaggcctcagagagaaaggggtattggaggttgggcctttgaaggataaataggagttcactcagcagagacaaggggaaaggcactactacaacagcaaaaaccaactgagttgggggtgatgaggttcaaaacagactgagacccatggagcaattgtggaagttttgaagcagggtaatggggtatggaggtaggcccaggctccccgcatcctctccccggtccttcctctcactcatgtattcatttgttccgcaagcatttgttgagcccctaccatcactgggcacacagaatgaccgtgcatgggctggagccacccaagagcccttacctttatcgaccaggtggggaaactgaggctcagagacattccttatttcatccagagaaagcaattgcttatggtacaatattagtcattggggacaacaatattttgggagatatggggccaactttggcctggattcaaaccctagtggtggggggtggggtggttttcgttcttgtttgagacagagttttgctctgtcacccaagctagagtgcaggggtgcagtcgtggctcactgcagccttaacctcctgggctcaatcatcctcccacctcagcctcctgagcagctgagaccacagatgtgcgcagccatgctggctcctagtagtgtttttatttttatttatttatttatttatttatttatttatttatttttgagacggagtctcactctgtcaccaggctggagtgcagtggtgcgatcttggctcactgcaacctccgcctcccgagttcaagcgattctcctgcctcagcctctcaagtagctgggactacaggcgtgcaccaccacgctcagctaatttttgtattttttgtagagatggggtttcactgctttggacaggatggtctccatctcttgacctcgtgatccgcccgcctcagctgcctaaagtgctgggattacaggcgtgagccactgtgcccggcccctagtagcgtttttaatgtgtggtcttgagcaagttggttgatacctctgcacacagtttccctacctgtatgatggagatgataatagccccttctctgcagagctgctgggaggagagtgaaataatgaacactacccacacggtgctgcctcagtcctattttgggtccagcctctgtgacctctccccacacggtgctgcctcagtcctattttgggtccagcctctgtgacctctccccgtcaccctcaatccctcccaactctggcctggaaagaggcgaagtcataacccacctcccagtggacagagtccaggcccccccaggctcccgtcgctctcctagcagccccagctactgcctcccgtcctcacctgatgccctgctggctttgcctggacaggggaccacagcctgtaccccacctgcctggtgggtccccagccagtgtcagcccagccaagctgccccagggaggacacagaggactctgagtgctgacagttgcttggcaggggctgagctgccgggacccagcggggaaggggcttgctggagcagggacgtggaggattctcactggcttcacgctcccactctgagcagtgtgagccagagtttaacatggaccctgccacttgcccaggcatgtggccgcactccccataatagctgccacgagtcacattcctccttccacagtgattaacttagcgcccgctccactcccagccctgctacagaaccatgttgtttccagccatcttcacagattggctgcctcacccacagcacacagcatggcgtggacagtcccaggacttaatgccttggctttcttgctccatgtcctatgttctttctcctaccccagcactgcccagccccccaaggggctcacccttgagtgggacggacagcaaaactgtggttcttggccacagttagggagaccagacgggaaggagagagtatgcactgtggaagaggttcatcctgtctgaacaagggagaaatctaggaagacttccaggaggaggtgacatttaagccaggcctcaaaagatcgggggagctttgtagcaactgtttagtggtgggacttgtatactaggctttgagcaagagaacttttatttcagataaaatcctagaaggattcctcatataacagggatccctgtagcaccgtgaagattgaggcaggaaagggactgggaatgctgcaaatggagacatacacctcagagactgagttggcacagaatccatgggacttgatgatgagggagagggaggtgacaagcctgatgcccagcttccccatgaaggggagaagtagggtgtggacgtgcaaatggagtattagctgctgctgcagagctactggcccttccaggcccagcttcatgtctccagcaccagcccttcattagttctcaaaagggcgtgagttggctgcaggctctgctgggagcaggatgatctagggtggccccagctgtgccagcttgtctttgctccatcaatctctcatcctccagcaggctggcctgggtgcgtcctcatggcagccccagggctttgagagagtggaggtcacagggccactcacagcctaggtcctggactttaccacgttctgttagccaaagcaggtcccaagtccagcacagagaagtgcaggccacctggggtgagctgcagagccacaccacaaaggacctgggtgcggggaggggactgggctgctctgccaggccatctacacacacggcagttccctttggccacacggcagtagaggcagctgtggacatacaaagtgtagatagctgggctcaggatcgagtctcgcccaccatcagcaggcgagggctcatcagagccctggaagggacaaaatagcagggttgtgttcaccatggaacagctggctgaggaggagggtggacccctgggaaactgaggaacagctgccagagaaggcgagggagaacaagtgagctcgagagtgaaggcggggaggacgggcgcttggggtgcagggagggcccccagcgtgactctgccagccaggcggtggggggggcgggggggtgggagtgagagggcactgagggagtgggctggtcaggctgatctgatgtctggccagggaggagccccaggcctctgtgtcaggcactgggactgcagggcaccagggctgcccactggctgccagcctctgccctgcactgcgctgtcctggcctactcatcctgcccccttccaattcttgttaaggaacccactttggagacaagcagtgactgaagagcaggcagaggctgctacaccacagtgtcctgtctcaacctttccccactcaggccctggggccaacctgtcagtgagtgcccaggttccccaggtgcaggcaccaggtcaggagccagatcactgaggactggccttgcccagtgactcccgccccgtgccccatgtggggtggtgctggggcagtgctgagggagccagtttggaagtggcgacctcctaccctcaacttcccttggtgggagtgcccgcagctacccaggcgtgccaggggcaggcctgggattttagcctagtgtctttggaatatctagttcagccccagaaccacatctggcttgcctgagccaagggaaggggaacagccgtggcacatctctagctgctggccctgaatggcagtttccaggtccgtggcactccagcttctggagacaagggcagatcgcctcagagaggcctgctaccacccagccctgccctcagggctgcagagctgtccctgccctgccttctggccaccaccctgtcatgatgccattgcacagagccacctccagtgtgaacaggaagattgtgttggagagagcaccagcctccagctacttttgggtctggggtttgttcagaacagtggctggtgaggctttgggggaggggagccgagaaggggactagagactggggggtccctgggggaaaagccagcttctccctaggtggcagtaggcaggggagtggagactccctgagatagcaacacctcctgggcctaggtgggcataagcactggccatgcttggttgtcctctctgcccctgcctcctgcgcccactgcatgccacacatgtgcagggtggtttatttttaaattttattttattttatattttattttattattttattttattttattttattttattattttattttattttattttattttattttattttattttatttcatctcagacagggcctggctgtgttgcccaggcaggggtgcagtggtacaatcacagctcactgcaacctccgcctcccaggctcaagtgatcctcccgccccagcctctcgagtagctgggactacaggcatgcgccaccatgctggctaatttttgtatttttgatagagatgaggttttgccatgttgcccaggctggtcttgaactcctgggctcaagcgattcattcacctcatcctcccaaagtgctgggattacagacatgagccactgctgctgccaagatggtttctatacactcccatcctcaatctccatgataggcatacagtaggtggcataatgcccattttacagatgtggagactgaggctcagagaagtagcagatgctcaaatccaggcttgcaacaccactaccagtccgtccacaggggttcatgacatgctcactggaagttagtgagctcttccaggggctgggcatacatccagggaagaagacagagctggtgccctctgggagcttgcctgccagtggggaagaaacaaggagcaagacaagatcacacaggccagtctcttaggaggcagtgacaagtgtggctggcagagtaaggcgggagggagggagggactgagggactgcctcaagtgaggaggggcggcacgtggaactcagggggaaaagctctccgcggaggaggtgaggtgagtcaagactgccaggccaggggccgcacccgcgccgtggagtggagtggagtgtggagggttttgtgcagaatctgattaactctttgaaaagagcccctgcagtctggagcctcgcgggcagtgcggctcccctcctggctgcagacaaaaccccacagctgtggggcccccaccctgtcctaaccaccgaaacttctctttggtcacaggttgcatattcatcgaagagaacttttctttgaaatgtcccaaacataaggtaggggaccacagtgttttgtagggcgaggggtgtcaagcgggagaggagccccacctcgcacctccttcacagtcccctgggcccccttggctgcgcagccccgcagggcccagccctaggggagggagctctccccgcccacccccaggagcccccgccgccgtccagctcaggtccctgtccacttgcgcgccgccgccgccgaaaacccgcaggcgtcggggcatgggcagccaggggctggagggcgtccctgggacggcctccctgcagctccccaagataggtgacagagtggggcaggcgggggcgcgggacggtggcacggagctgaaggcgaaggtgaaggtgaagctggacggggtggggccagaaggggtggtgccgacggcctcgggcggagaccccagccgcgctctggggtcgcctgggtctggggcttaggcggggggcccacactgggggcggggcctatggactgtgaagtccgaggtcgtcggtaactggcgggcgggcgtcttttgcagaggctgccgtagtaatccaccccaacggccggaggagccgccggagcccgcctgcccgcccgccgccgaaggagaggagccgcctgcgcagcccccgggcctttgagctgctcccagcgctggtccagagccgatccttgatccgggtcccggatcgtggatccggccgcctagggctcagacttgcggccccgggttgggaggaaaacccgttccggagccgcctgctcccggaaccggacggcacagggcgttcttgcccaccccaggggccaggcttgcggagggggagcccgcggagcggccagactccccggggcgctcagcctccggcgagggtgggagacggctttgtcctggggacactttccctctggaatctcaagacgacgtggcacacattccacgtgggtgctgccgccaccccagtcggtcgtggcgtgcagctgggagccctgggcttgggggtgggggtcgaaacagtactggaagaggcggagggcggctcctagctccgtggactaggcgggggagaaaggaagcctttctgagagcgggctaggccggcactggagaggccggagcctttggaacaaaccgtgcggaacgcgtccaggggccttcccgcccagcctttgccagatctctcgtgcggttcgggcaaagccggggtagacctgggctatgctcagttaggggttgcgggatccccgagtgtgggcgggactgggacaccctttggcctctgtttgtcccctttccagtcctccaccccacccctggagcccagcctgggagcgcaaaacccaagaagcggccagaacgcacctccggctccggcggacgcgcgaccgttgtgcaccaccagggaccgccgcgcctactctgcacgggagcagggacagcgctagatttcgtgtacaaaacctgtgtacccctctatatatatgttacatagaatgtatatatgttgggaacatgctcgcttctcccgtgtgtcgccgccgtgcgtcgtgcgcccgcaacagagccccaaccgggcctttgccgggtaaggggctaccgcgacgccacttgtccacgcagccaccaccggcccgggccagtccctgccagtccgtccgcctgtccgtccgtgtcctcagctctgtccacgcttcgataggcctgacgcagcccccagcccagggccgccctagcaacttcctgtacatatgactgtaaaatggtaaacgtgtgtattatatctggcctcgttatatagtgtatatatatgtatacatatacatatatataatatatatgaagactgtaaatgttaagacgactagtgttcttattagtatattgcttcacactgaagattgtgtgtatcgagctgtttctaaaagatgtttattttccttaagagtaaaaaacagtcattgcattcagaaaaaaaaaaaaaaaaaagtcaataaagatacaacgattgttttggaaaatctgcagcccgtggattccgaccagattcagctgggagccgggccaggctttaggttggggaatgggaatgaagggaggggctgggggggggggcatgaatggagtcagggagtcggcctttcacagaacaggaaacctcccccgcccctgtgccccctctccagtgtggcggcaggtcgggagggaggaggcttctttgctgtgagatgaccaggggccgggatgggggaggtgagacgtgccagacttcttgcagggagacccaagctgtagctcctgtcacacaacaggtcctggaagtcagtccatcctcccgtgccacccagggacctgatggggacagagctgggaggtgagaagggacaactgaccccatggaggccctaagggttgacacagcccaaccatgtgccctgggagcagggggaacaggtaggctggaggccatacagccagccctccccactcctcccactaacaaacaaacatcgggaagagctaagttaaaagttgtgtaccttgtggccggagggggaggggaagcctttccctaggtgctgggggagggcccaagcactctcactagtcagcacatccatcagctgaagacacaaaacccagattataaataatttcatttttaattctctgtacaaaacttctcaatctatgaaaataaagtttgcaaaaggcaaagtagcacaggagcctcaggtcaggaggctaagcacgctgacctacactatgtacacgtctctctcccacgacggagagagaggcctctggggcagagccctgcttgcagtccgggaaagccaagttggcttccgtcagcacagggaaatgtacccctctcttccctgtacacaggaggaaaaaagccactaaggtgcctgcagagcaaggaggggggccccccaaaatggctcggcccctgcagtgccccgatcggccaccagaggtcagcaccatcatggccgccggtcttagggtcaagatcgcgcccctcgggccttccaccgcgaaggcacacagcagccgcaggtcgaactgtggaggccagagtctcttgcactgccttcggccttcaaagcttcgacgcaggacagaagctgcacgggaccaaagtggctagagacaggggtgctgaggccggggacacggggtctagctggaagtgacagtggtcccaccgcccaggcgcatgagcatctgctgacagtcgtgcagcagccggcgatcgccaagcttctcgagtgtgcgcgccgcctcagccagcatgcccacgcgctgcccgggcgccgacaggaagccggggggcaggtagcaggaggccagcagcaaggcctccgcgtgctcccgccgcgtgggccgcggctccagctccgccaccgcgcctgcgcacacgaggatgtgtcagggatgggtctcaagctggccacgcccccgcgggagccctgcccacacacaagccacggcaccagccgcctgtacctg

SEQ ID NO: 499 - DNA, 325994 bp, Homo sapiens
  source 1..325994: mol_type = genomic DNA
aatatggcccaagatttgatgagtacttttttaaggtgacctgatcacttacaggaggcatgatggaccagaatgtctccccaccctctcatcattctgcaagaaataaaatgtgtggcagagaaaacgatttggtgaaaacaaaaacaaagatataaaaaagtaaactgtttaagactttgagaacaatatcctttgaatttcaaataaccatgtccatatctgagaagtatccctgaattatccagggcgggggcatctccagggagattatccagggagtcctgagggccacctatgacgccgagtcattagtgagtggcagaaacgcagctcctaggagcagctgtagagcaaagagctgtcctgcaggtagtggtctctgatgttccctcagcgcaggcaggggatgaatgctgcccagaccatcgctgatggggctggcccagatctacctgtaggtcagcgtcctctgggtagctttaaaaagtggagatgctgaggttctagcccagacctggtgggtcagagtctgtagcagacaggaacctgcatttgacttacacagattcttcaacgctgctgacgcacaggctgggacccactgtgtccaagccacaaagctctaaaactccacaacaagcttcatgtgatgaggtaccaagtattagaagcaggacgtaccatcaagcaagctcttgttatcagtgaaaagctaaacattgaatttagggtctgcctgactcccaggaaggcatccagaccatttgtgaggtcacagccatgttttgtaagtattaggtactcaaaatatttgctaactggacaaatggatgatttttacagacttctaatacaatgtcctgaaaggtcactgctgcctagcccatgagtagcccacgatgctggcagaggccacctggccaggctgtcatgcgaaggctggggtctttagacgggggcatcagcccggcttcagccataccaccaggggactgttaccacaccctgtctatcacttactcacacagacaagccctctaaggctgtctcctgctcatcagggataggggctcctgaccgctagaagggtggctcgtatgggggctgccctggagagagacggagcaaggggcacagctcattgtgggctcggatggacgttgcggtagcaggtgatactgacccagccctttaatcatgaagagagaaagcgatttaagtagattagaaccatgatgcttggattcagagcctcttgtgactggatctcagcattccatgttaggaaacgaggtgaattttacataaacatgttggtaagcttccccgcattggtaccagctaccattttggatacatgtttaggctttggttaaaatatgctttcacacaattctgtccaataaaaatgaaagccacctttttattagatgccagggtgaactttattttcttataaactataatgagaatgagagaaacatatagcactgaagtgctgtgtttccactttattaaatcatcacagtaaatcagaattaaagagtaaaagaggttaactggagagtcgggtggctgccatcagtggagatgtgtgctttctcggtgtggctgcctgggccgcggtgtgtcctggtgcacacacgtctgcaaggtgttcccaccacctaggaaggaacctagatgtggagcattaggaaaattaaataacaagagacagcaaaataagaatcaaatgacacgctataacttaatttaccatatttatcaaattttttccttatttacatgtactaaacattgtagacctgaaaacataaggaaacattcacttcatgtgtatgtcatatggacagactgagtgcaactaaaacgatggttgtttcatgttgaatttccctcggatgcagacgctgcccttcagtagatataaaggtagcacagttacatttacgacatcacagttaggttttaaaggattcatcagacctccacatgacaccgatacagcaggtccatggggcgcaggtggtgccacctgaggaaggtcaggaagacaggatgtgcatggctctgtggatctgcatgagctcttgcttgtaaggctgagggtctgatcaatcaacctatgtcaccaagtttgggtcaccccacttccccaacatgtggctcttaggaaccgcagactttgttgctgaggcaacccaggctaaatttcttcacttctgtctgctgaaggcttatttttaaaaagtcataattttttaaagtacgaaagcctaagtacaatgagacgataaacatcagctttgctctggatggaatctgggaataggtgtgcagagaagtgagggaactggcctggccctgcctgaggccagcgagtcttaccacattttggcccaattagggccacttctgtttccagatggctgacctactggtaccaccgtgatgagtcagcgctgtgcctcaggtggggccctagtggatgaatgatcctccgcaattttgctgaaagggatttattacaaaaacacaatatttgcttttctaagtaaaaaaaaaataaaaaagaaacttgatcattgcaattttccaccccagataacaaaaacaactccagtccacgtgatcacgagaaacgtggctgtcagattccctgctccacgttccatctccagaccaaagctgctactgagaatggcaggctcaaaaaactctagtcaccaaactgctggctgtcatcgggggtcatggggtcgttataatcctcaggggttacaggagggttgagttatttgctgcctacaattgaatttcccaccccaaggtagggatcgctggttcgtgaaagcaaaatgaaatcatggagcagaagtccaggagagttcaatacgatttctaaatcctgacatatcttttctactaaagccagcaattccgcaacaggagtttctagagcctgaagatgaaacgttctcccagaggcgacctgctggtagagacctacaggggactctggagcctaggagcatgcgatggccttcccaacaggagtgaggtaaacaggagacaggagcagctcaacagcaggatcaagcctgagtgatggtggccaagctatgctgcccagatgtctggaatcatttaaaataaaggggcatttgctgacaccacagaaaatgccaggacttgcagtcactcttcacattgcccttcagcccccgtgagtatcctgggcccttcccaaaacggcccaggggccagaagcttccttccactttggggcaccctcattctcttctgttcaggtggttctcaaggtgctcctgtcagtgggcctggcctgcaatcccctataaagcagaaaagcaaattctcgccaggatgagcaggcccgcccttccgacaggaacgactggctcagctctttctcatttgtcccaagagtgagtctggctcctgagtctccccgttttccctacaaaggccaggttccagccaaaccagctccatggcaaatggaaaaaactggctcctcagtgaaaatggccgttctgatggggtgagagcctcagaaggcttcttcaggcctgggtggccaagcagcctgaaggtaacaagtgtgtgcaagggcagagggcagagggcacaggaaggtggggaggcctcccgcacagggcccgcctttcccaggaccagcccacccatcataagccctgagttaggggctgcgtctctcgtgctgctgtcccttcccactgcagggcgttgctctgtacctggccgctgtgagaacaaagcctgcgcagtggcgatggactctggtaagcttcttggatttacttcccaagtgaagtgcggggtggagcaaacctctagctctgaggcaggtcaagggtccaggacacagcctggggcctgcgccagcagctcttcgctgctgactgatttctctgctgcaggacgggcaaggcccacccagggcgccccagcaggagagggctcaccattgcttctcttttcattcattcattcattttgtttttaagaaaaaaaaacaacaacaacaaaaaaacaggtctaataagccttccttggagccaaatgggcaaaaatgtaaggattaaatccctcgcttggaatcggctaccaaaagctttgtgtgacaagaaacatttctgaggcctgtgtgaggcctctctgggcaacagacaggagcagcaaagttgcagcgtgaggcttttggaggcacaaggccattcggggggtacccgtctcagcctagcgcctgaagccggcatgcgccttttgtgtggatgtggtctgtgttgttttgagccttgggacacttcctgtcctgcaggaacttatgcaaggacaggaccctgtatttctggaatcttctgagtgttctaagataggggcatcactgtcatgacctgaagcgcctctgcgtggtgaggagagcctctgcttagttagcgggcgtcaggtaccatgtgggaaaacactggacaactgaggtaaaacttctcctgggcaaaagaccccggggaaagccaatttccatgatgatgaaatttttgagtaaaccataaatcctaacataaaaggaactagcaaaatcaatgcagatcagattcctcaattagacaattgttttgccagcccctttgtgaatcatgcttgggttcataaatgagaagaaacaacttggggtgcagaagcaagctgccctctgccccctccctgaaagcgcagaatcttttcctgctgtcatctgcccagagcagccacaccagtgcccacgtgtcagtgggttcatctctggtttttggtgactttttcttttcttctttggaagtccaaggtttgtgaggtttcaggacaagatgatacagcctagtttgagtcccatctgagacacggtagtgggattcaccatgggcttcagaagtccactaatgggaagacctgctgagggcactagtacagcaacgaaatttcctggagattctgggtttagtggctcggggcagaggcaggagagggtgttctgtctcctcctcactcaggggctcttcgaggtcagcactcagactggaggccagggcccctgcaaaggaagcagagaactgctaagtcatggaggcaacggcggctctacggccacacatttcagggaggatctgtggcactcagaagggagggaaactcccaggagaagggtctggtgacctcctcccacgctatgccggcaaagatgtttgttgaatgaataaacacatgaatgtctttcttcttattctttgccctgggcttttctgcagcataaaagaagctatgaatcttgtgaaattaattcagacttactgtccaattcataagtaaagaatgaagagaaaaggcatctggtcacagtgaaagggaggaagagccactgaagaagcagtggctggagtcaatggaaaagcccgtgaaacttcagaggccgctctgcagatccctggcggtgttcctggaatctccacgtgtttacatatcgatattctacacaatgagttacaactcgattattccccaaagggtctaagactagaggtcagtcctaaattgcttgtctgaatgagtccagatgagcatacagctgttcatcactggagggaaaaggaataaaattaaaacctgcacatctgcaccccccgcttccccagggctgctgtcggtgtgctcagaggaatacaagaatgcctgctgcaacaccaagccactgttgcgggtggagctgggtctcccctagcaccgttctgcgagcgagaggatcatttcatcacccttcccctcgtagtgtatttttaaaccctgttgtattatgccccaagtttcctgcatgacctctgctgggaaccaacctcagaagcagagtttccacatcttcctccctgcgtgattcacttgcagggctttggcctttgaaattattattattattggcatttgaaattaatttaagtcagttattttattcacagacgcatcttttttcattctctgaccttcccttattgtttctaggaggagtttccaaaatcaatacttgcaaacgtgcttggacctatggaggcagcctggctcagggtgtcctgaaattcagtactttcagagtccaggggcttcatggttgcctcccttcttctaggctcagtcaggtcgggcatacagagaaggctcactattctcatctttaaaacaggctgcagccgggcgcggtgggcggatcgcttcagcccaggagttccagaccagcctgggaaacacagtgaaaccccgtctctacaaaaacattgcaaaacttatccaggcatggtggtgcgcacctgtagtcccagctacttgggaggctgaggtgagaggattttgagcctgggaggtcaaggctgcagtgatggcttcactgcactccagcttaggtgacaaagtgagacccagtctcaaaaaaaaaacaccacacatgaaaaacctcagaacacaaaaacaggctgcttctgacaaaggcagcacagctagaccatcatccacaagagaagctagattgttacaaggcatctctccatcccctcgcagctggtggtgggcactggcatttaatccagggtgtggggcagcatgggagaacagacttgatttaatcccagacaatattccaacagcccagcccactatggtaatcagattgattctaataaataagcaaaaaaaaaaaaaaaaaaaaaggcaagtaaatgaaagatataaagtgagatccaaagagaaagagcgaacctttgctaattctggattcgaaggaaaacattttagttcctctgccccacccactcacccagggaggataaagagggaaagaggggtgcacctcgagttcctgcagatggacagaggaatgccagctttgtcccgctgagtgagcctggagaacagcaggaagctctgcagagaagggggcctgtgcacctgaaagcagggatcccatggccaggggcaaagggcaaagccacccctgcagctgggctgcagccagtgccacagtgccctacacaggcctctggtccccagctttctgctgggacattctcatctgcactgggccctcgtgccacagcaccccgtggtggggaggtggcagctgcaggacaggtaggcgggacacaaggtacggccgccttcctgatatgacacgtccactcgcagctttgctccactcgcactgcctcctcccggtgatggaagccaaggatttattcacaggacactcgaacctcacctccccactttggcggcaggagcaggaggacatgcatggagacgggggtctcggcaaatgcgaagttttgcagcaaggtgccctgctgggaggggactgtacaacccttctctgccccatcttgacatgagcacctgggctctgaggctcgtgtcacctgttggggctgacacgagtgagcccagtttgggacaatatcaggactgggcttaagccttgggtgaggggaagagaaagggcagctggctggagggtcggctggctgtgatgctggctgctcctctggcctgcaggtccaacagccctgcctagcagaggagggtgaaggtttggataaaccaacaaatctggaccctaacatcccacttccatatttactgagacaaagtgactggtgtctgtgccttgcattccactgtgggcgacaggctcaggaacggcagctcgctcacttgctttctcctgtgaatggcattgccgtgatccttgtcattaccaactgctcgccttccgcctgtgagcctgggaggtggtgcagcccaggccacacgggacagggttttcagacagccttgccaaggcggctgccatccatcagagcgctctgggcagggcctggaccccagacccaggacagaaaggcaggctggggaggtcacacctgccatggccagcctatcctctgggtcctagaccgcagcccattcctaggtctccaccctctgcgctcccgcagcttttgtccgcttttccttccccagctgttccattcagcagcccccgccacaacctgccctccccgcatggaggtctcagaggcctccattaaggctggcggtcaaaggccggcccagcacgtgccgtgtcttatcggcccatctcaagaccctgctccttcaggcctgggcaacaaaaaagggggcggccccagcgcccgctggctccctgcagccccacacacaaaagggcaggcgacaaagacattttccgggatggcaggtgttggtgtcggattcctccccgagtgcacgggcagaagaaaggcaaggctgggcttccccgggcagcgcagacatgcaggggcaggagtgtgggcagggcccccggggaggggaaggcccaggagggcgaggagcactgatgcagggtccgctaccgagggcagccgattagaaaagtcccaccccctccccaaagcagggtggctggacaaatccactgaagtgtctgtcttaccttgctcaaatattgaaatgagacctttacgtgttttaatctgaagggaaagaacacaaaatggaatgaatacaaacacaacacccccacagctccaacttgataactaacacagtgctaataatacatttatccctgagctgcccaagcatttctgcagccttgtcaatcagtaaaaactgaacattcacttgaaaattctacttgataggacaaaatacaagccgatgtcgtgtttacaaatgtgaaatgagagagacattagaactcccaggatctacgcatgcagaccttgtcaggatctatgcatgcagaccttgtcaggagccctacagatgctgaacagcactgacagctatatcctttccctgctctccaacttttcctgactgattttgtttaaaatacaaagataaaagtgttttcaagacaagcatttgaaattcaatggatgacctgaaaaaataattgaaaccccctaggtgggcaagtttacatgtctccaagtttcattttacaggtttctgagttatacacagtgtgttaatactggtgtcacctgcaatatgacagtccccagggagggaacacacagcatcctgtgcagaggaaagcttgggagggttccctggagtggtgaaattggaccataaggtcactctcacccacagagcagcagggtctcagtagtcacacagaactgagggggattttagcttttctatgccttgtgacaggttcttccaccccttccacgccatcctatttcctacggcggggtttccttggcaaatgcatcctctttctgcgtcaggcagtagcttctcctgaactctcagcccccacaactctcctgaattctgtgtcagtagacgaccatcagatctggacaaaggacatttatcagtgacgtggaccattgtctgcacagtcacagttgtaaacgtggattttctgctgaccccctctgccaaggttgccaaggttggcacagtgacaggggcaaacttctaagatggtggctccagcagccatcaggaggtgaccactaacattcttttagccaaggctccatgaaagaaacgtgcactgctatggagacatcttttccaatctattgatgaaaattgtccctttctcccaagaaaattatttggggttaggagattctggatcagtaactgatcgtgggtcgtgtatgatccttggtttgatttccaaccaccgttaacaccgttccttctccacacctggttgtgctctttgggcacaagaggttctgggctgctgctgactgttggtcatgggctagaatgttttccatggatcctcgggatgattaatcatttagatttctgatttccccccaatgtgctgtgctgaagggcccccatttcctctcatggaagagggcaaacatagagcatatctgcgtgggtcttccttgagttgaggaagttcggcttttagagcaccatgccactgacaccctccagtgtgagcaaagggtctctttatgaaggcgctccttgatctcactcctctgcagcccctcagccctggttatgctgtgcgtacaggcacccgattggtagaaaccaagaaagcagatggcgcagctaacaatggaggacttgtttgtaattgctgatgaggactgggttgcccctctcctgtgcatccccagacgcagcctggtgtggtgtgctggaccacaaagaatgtctcagtaactgccaatccatggttgagttaaggagatgcaaagacagagacagttgggggctgccttgattattccatggggctcaaatgtcacttgcccttgacacacggcggtgctcccaaagggtggggttccagtcgtggagcagaggagtaagctgtcagcttcctgatacatctctggggtacgcacagggcactgaccaacctgggcagtgtggagggcacctggagggcaatgtgctcggagatggggggtgggaagaggccaggagggacctgacgtctgggggcgataggggagagacacaaagcctaactgtcctatccctttgtcaaatgagcagcagatatgtgccaggtactgttttaggctctgggttacagtggtgaccaaagcagatgaaaccgctgcctccaggggatctgggagaaaagttacagcatgcagtctaatgaggggatatcaccccttggggtggcaaaatagcctactctttatatgcatacagcacaggtctaagtactgtaagtaaacagatacacagtgtttctgtggtgtttcaggggaggggacaaattaggaaaccaaaatgtctcagaaggctccacggtggggtgataatggataaaaggttgtgacagccgggcacggtggctcacgcctgtaatcccagcactttgggaggccaaggcgggtggatcacctaaggtcaggagtttgagaccagcctggctaacatgatgaaatcctgtctctactaaaaataccaaaaaatcagctgggtgtggtggtgggcacctgtaatcccagctacttgggaggctgaggcaggagaatcgcttgaactggggaggtggtttcagtgagctgggatcatgccattgcactacatcctgggcaatagagcgaaactccgtctcaaaaaaaaaaaaaaaaaaagttgtgacactaggttatagggttacagtgtcttaaatttgaagtcatttttacctatttgtggtgctgggaatcgaagccagccctactcatatctaagagtagttgagtgagactcctcggggacagcccttagcagtttaactcagacaccaaaaggccaaactgtggccaactggcggctcagacacagagttgagccgggggaatccagaagtcacttttgaagaaagatgtcttgcttcttccaccttgtgtgacttctccgatactctggatatcaacagggatttaaagcagcacaggaaacaagaggctggctggagatgtgttgtgttatgtgcggctccgcctagcagaggcgttccaggaattggtgggcctttctatggcatgctttctccagctgtactcactgggatagcaagagagcaaggctttgaaccaagcttcttgcctctgaagaaaggctgccatccagaaccgccacctgggatgaggctgggcagggtcaggacaagaaacgctgctgcctgtccttggatcctggttactgaacagtcagtgtggaaaatgattaactggttcaagataattaggaaagagaatgattttgagagctggcatggatgagggagagaaacagtggactagggctccagctttaggcaagtgctaaatatcctaccagcaggaaggcggacagagtgggagatcagagagctgtctgggctattcagaccccttggaatggctctgaggaagggaacaggtgcaggcagtggatggggtaagcccacacactcaacactggcaacccaaggccagtgggaattagccagcctaattaacatctccaaatggcccaaggatggcttccagtatttccaatccagcagcagtggctgtgtcctggccctggctctgactctgggtttggcttcctctttctggttgttggtcttgcccatcacccttggttcagaagccgaaagctgggacagctggacaggaagggagggaggaagggaaagtgcatggagcgtgtgcctgtatacgtgctgctcccgtgcaggggctaagtgagcaggtggatcattggtaaaaaaaattttcctggcatttttttctttctctcccatgactataatgtacttgtgtgtggctctatgactaaattaaactaaattataaatttaaaattaatatcttggtgtcaactttcttgttaggccatcataaagaaatgtttccagactctctcactctcatggaacataaacaccaagatttccgctgcatcttagccatgggaagtctgtgtactttaccagactgaattcacatgagtgagtggccacagaggacccgaacattcacagcagcaatattcacagtgaccaaaagtggaaacagcccgaatgtccatcaactggtgaatggaccaataaaatgtggtctatccgtacagcagaatatttggcaataaaaagaaatggaataccgatatgggctacacatggaggcaccttgagaatatgctaaaagaaagaagtcagccaccaaagaccacatatgggatgattttatttatatgaaatgtccagaatgggcaggtccatagacacaaaaagtggatttgtggttatttagagttgaggagtgggcggggagaagtgggattgcctatcagcaggctgtttaaaaggggggatgaaatgttatagaatttgattgtggtaatggttgcataacctaatgaatagaccaaaaacatcgacttgtatacttcatgtggttgaactgcacagtatgtgaattagatctcaataagctggtttttaaaatggcaaaatggaatagaaggtggtctgggtggcactactattcccatgattccaaaagtgacacaacagaagtggctccaagattttagaagaaaaatcccctggggcacccaggcaagcaggggaatgagggcagctgtgaggttctgtagatgccaccagcacctctcctgctgtgccaccccccaaacctcacaccaccctcaaagcaaatagggccaacccactgctggcacactgcttttcagtgacttgttttcccttccagggtgtctcccaagcttattctaacttgaattgatctgtcttaaaacaactcaggagtgaccggggcagtgaggtgggattactgtgtgatttgtcccaagatacactgggagtgtgtgtgccactcaggactattttttaaaagtttccctaataatcaacagctcaagaaaatgtagcagttagatccatgatgactgtgggaggacagtgagttctaggtatttgtgtgaggtgtctgaggaaacattgcagaagcaatggaaatgtctggtagttttaccgataaaaactgtcttgtccccagaaaggaattttggcccataattaagatacttcctatatgtgaattatttctgtggtgctccttttgaattgcaaagtaggcaaccctttagctaaatttctcagttatccgtgccaaagtggcatggtctttgccactgtataaattgtacaggccatacattctagaaaacagtcctttctgccttcagggagggacattttgccattgccactgaagaagggctcctctcccccactgggttgttcattcctgtgggtgggtcccccacagcaggcacggagaggcagcggggctgtagggtggagcaatgagtcctgtctgagaatggagaggcctaagtgctcgagctctggtctggacatgaccagccacctggtgatggaaaaaccagcctgcctccattcctcaactgtcagagaaatcttgccccatgggaggggggactctggggaaagtgtgcagtaaactgcaaatctctacatgtacataaagaatggtgacagttcacagagagtcctggagaccatttttgtaagagtaaaaaaagctagggagccttgcctcccatccttgcccttctgtgtcactgagttgtttaaagtctcttgaatcactttctgtgtagtggggatggccatctgcgcgattcttcacgcacacgcgtgctcatgaccactggaacttacagggatctgcagggtcttgagggcagggcgggacacgtggctgagctccacgttctgcctgtctgggcaatccaggacaggggctatgttctgtggtgctggagtgagggggcaccgctgagggcccctctagtgccccccagggaatgttcaggcagaacacctattgtataagcataacatctgttcattcaccagacacatatgacatacctgttgcgtgcccagagatgggaatacatggcgagtaaactgtcatggaagttgtcccccatccccacagtgcaccctccccactgaagcctgactgaccttcgtggaagagtcatatcacagcactctgctgcttcacatctttgtgtgctgcccatctcaccagagcaagagccaaggtcttgccctctgcccgtaaggccactctgaccttcctgttcttcctgcccaccctggctcactcagctctaaggaggctgggctccttgttccttgattgtgccaggaaagtccctgcctcaggcccttccacctgctctttcctgcccctccttccttgtcatttctcacacgccgccttttcagggaggccttctctgaccccctattttaaagtgcgcccccaccccaggtgtgttggattttctcagtggcactcccaaggctctttccctgttgtcttttctcctcagtactcttcagctcctgagagcagacactgccgtctcctttcccgtctggaaggtgagcctccagtgaaggaagggctgctgtctgtcttgcccatctctgcaactggcatattcagtgtttggtaaacatttatgggatgaatgtctgaaaacccactttcgtgggctttatgagatgctctgaggagtgaagctgcagttcgcatctacttaaattgtagcaaaggtgcatccctctgtgtccccgggtcttaagtggacctgagttttaatatctcaatttggcctctggcaagttgctagctttgggtaagtgggagaaagagcagagtcagcctagcgggctacagatttccacttctggcctcctccttccttctccgtggtgatctatttcctctgggactctcacatgtgatgctgttgggtcagcgactgtcaccctggtccggagcgcccagcctcacgaagctgcatgcccagatgttacctggaggctgtggtgctaactggagttgcgctgtttctccagctgcttctctgcaccctagggatgtagctagggagcagggcttccctaatgactgcacgtgggctctgggatgcacgctgactgcagagtctacccatacacattcagcagcactggcaaggcaaggtgtgcacacttcctgttttgcctgagattaggggtatgggggagtggaaccttcccaagccatacccatgattccttttccatatcctcaggcaatctcacagatcacacaatcccacacaggagaagacagatgctgggatggtggaggccactggttcccaccacaggtcacagctgagtgctgcgggaaaggcaagaggagcctctgcgtgggggcacaggtaggtggaacgtgtcctctatgcatctggattttattgtctcatattcttgaagtggccacaaaatagaatagggttttccctattctttctcggcattgtctactgtgatgctactaggtttcttgtgtactgagaagtgaatttggccacatcaatgctgtaaatatgtaaagttacttatttcaaatggatgggcatgtttcccatttttaagggattttattccttctgctgtttgagggactttaaaggctaatgggcaaaaaggaaccggcaggtttagttcctgttatcatcctatatcttcctggaaaagggtagtacaaaatattctttcttctttctgtcagaagacttaactgcgaataagagaggttccatttggcctctgctttggtttggctgttcctaaacaggaatttgagcaaaaccactgagtcttctaggaggcccctcagcagctgaggttgtgcatgcaccacctgctgagccaggaggacttgagggccagtcacgattcacaaggaatgtgaacccggggtgtcgggagcttcaggttcttctgaaatacattctcaaggttatttcaaataagctttaattaagagttatttccaaaaattgtctctgagaaaaattcctggtacctgccagccatctcttggcaactgctaaagcgtcccctgagctgtaattagcagtcaggcaggaggaagatgccacctgcacttaaaactctgtaaggactgggaacccagaacctaacgcagcatttcacagaaaaaccgcaccttcagagttctgccaagggaacagattcagtgcaaggtcacacttcaaaatgaatgatctcaggccgcttcttattctgggaacctatgaatactcccagcaccagccccagggttgtcaggagtgtcactgtccccgcagtggctctgaaacatgtggtttctttctctctgctcttctcacatttactatcctctatctttttatttttgtccatgggccttccagttctcagacattaggcaatgtggggaagttccaaaccaactggcaggatgcttagtagaatatctaatacaaacgaggcaagttttcattctcctcaagttgacaaggcaaatggcatggtccatctcagggaaatctcaacccaactggcctaaaccactggctggctatctttttgacatgtggttatagtttggaggaaacttatctgagcttattaataaatagccattttttttgtgtgtggctcacgagtgtctgcttttctccaataagacttcaagcttcacaagggaaggagagacacaggcctgcatgagattcccagagccttagtttgtgttgcctgaagtgccctgcacagtcctgctcagtggcagcctccaggggcaacaaggaccacgtcagagatggtaacatctgacaggtagcagtggcactttcctagccaagcaaatgaaaagaatgcttgtctcatctcttccagagctgacactgaggagagtaaaaaagttttaaaagaacaaagggatgaagaagcacgaagcctaaagtggtgctaaacaaggtgatcgataattccctttaaaaccctcgagaccatctacgaaagcacctcgaatcaagtttcagttactcggtctgtggattcgctggctcctgacttcccctgcctttctccacaccggcttcttatcagatttcttgtcggtggcccactttcactaagagactgggaaggaggggacagatgaaacataattacgagtgtttgctctgcatcttgcatcaggcccacacatctgtggtctagagacacacctgtgctgcttaaagcaacagcctgattcctttctgtcctcctttctattcactcctgttgcatgtaggaaagaaatcccatgtaccagtctctaaagaatttacagtccattatggagaggagacacacacgcaggataaaggcttacatatgctaaggaaaatcaagatatatgtaaccacaagtcggatggcactaaaattaaggcctaaatatttcagagaggatttagggcagtggttctcagtcctgcctgcacgttaaaataccctcagttttttcttttttttcttttttaaaattccatgctcaggtcacaccccagaccaataaatccgaatctagtggagggactcaagcatcggtatctttacagcttcacaggggattccaatgtgaagccagaattgaatcccactgggtcttggtgatggaatgatagctggtaaaaaaaactttctatcaatgttgtaccatctttccaagaagaatacatcttaaattggaaaaaaatcaaagcaaaagtggtcagaatcaagccggttatgagggaaggaagacttgggctgtgtccagaagggattatgggggtagaagaaacatctgtccaaggcagttgtctgtaggacatgtggcaacactttggccagctacagccaagtgtgctgagggtgctgagtgggatggctgagttattgaatagatggtcatataagatagtttgtatttaaggaaaacttttgggtcaggtgcagtggcacacacctgtaatcctagtactttgggaggctgaggtgggcagatcgcttgaacccaggagttcaagaccagcctgggtaacatggtgaacccctgtctctataagaaatacagaaattagctgcatgtggtggcttatgcctgtagttccagctactcaggaggctgaggctagaggattgctcgagcctgggacgggaaggatgcagtgggctgtgctcacaccaatgcaatccaggcctgggcgacagagtgagaccaaaagggaaaacttctgtattatctgaatagagtaaaatttgactctggcctttagtatgaataaagagctggtagctacggctctgattatgggattatcactatagggtgggcacagggctggcatttccatgtgaaatggggaggtgaagattgagttggcactgattccaacttgcccatgaccttcggtggtcccttcctgggttggtcttcagcttgctccaaattaatgtgacagggttagacatgatctttcctgaagtcccttctagttcaacattctatgatgttctttgctggcttcagcaaagttatggggaagctgaacacatacaattcaaaagaagcactattaattaaaaccgtattaagaccactttaacagggagggaatgaatatgaatgtgatgagtctgtcacatgactatcctttcaatgagcggggaaactctttttggtggtttgggttaggatttacttgtgctgtttctgggaattaacttgattattaactgcccagtgaaacggccaaggaagactgcctgtcaggactgcatgcggaatgacgagctgcatatggcgcggaggccttagcaagcaaaagctgggtgtagccatatccctctgggcaaaggctggtgagttctaagaggagtttgtgtagtgtctacatctcagatttgctttggggcgaatgtgtaacataagtgcctccatctgcagttttaggagaagattttattggccaccaaaatgactcagtgacaccaggcagagtcttctggcaaaggttctgcaaacttaacataacgactgtgttgtagaagaaaagctacagaagtctttttcattaggtaagtggcaataataaccctttccacgagggcatccaagcaattgtgtgaaagatgaaagtttgcagttttgtgcagtagcaggaatggcagtggcatcctaagaccgactcagactaatctggtttaagctccaaatacgacctacattaaaagtggcagactctgatgaagcatagtgaggaattttctcccacttgttctaaatcctggagccttgacaatccagcctatcataaaggaggaagtatttctgaccatatcttggagaaatcaaatgctgtgtttatgcagggctaacaaataaacaaagacctgtgctccctctgctggctctctatagcaatattgaagcagaaaggaaccatacgtagtattggcatcttcagcaaacacaagtcagtttgggtattccgagaagaaccactcatttaacttggttttgaacattctttgagaaaaatctatcaacttctgacaaaggcacttggaaattcttaaaattagatattaaatgagacatacctgtagcccttggctaccagattgctagctgtgaccgtaatagtgatctggggattgattgatcaacagacacaagtggattcctccaaaatttttagatccagacacaatctttaaggcagttctgaaaaaaatctcaggtccaatgtaaagttcctttttttctcttttataagagcaacttctaaaaagcaaagatttacactatttatatcttttctgataatgtcaaacactagacttgattttccaaatcattagcatgcagaagaatgacctcatggtgaacagatgcacttggctgtgagctgcagtgattacatcagtccctcccagcagtcgagggtgcccattccagttaaccctttcaaggcctctctgccggtccctctttcttggtgatatgattgaaagcacaaatttagtcccccaccccaatatgtgtgtgtgtgtgagagagaaatgtatatgtgtatataaatgtatttatacataaaacatatatatgttaattgcaaccaatattttaatactggctacattttagattatttaatgctggtcaaaaaaggaaggtaaactatagtgctaggtaaaaaagtagttgaaatatctttacatgtcaggtgttatcaatacaagtaatggatggaatagatacaaggtagatacgatggtctttaaaaatattttctcattaggaaaatagattttgttttgaaagctctttgaaaaatgccgagcgctcatatattagcagctacaccaccatgtgtggttgacggcgcatcctgaacgcaagcctgttcacctggccaacccacccccgcagggcttgttgggcggatgggtaacagcacctggatggggagagtcagaagcagagggcattttccaacagtggaagcttcaggcacaggccattcccaccgagtgcatctcccacttttacttcagacttaaaggctgattttggggctttccctctagaagtgggggctgcatgctgctttctggcttgctgctaccaatacagtgcagaatgaatgcagtgttcaggtgatgctccctcttcattaataataaagtcctggtggtgaggatacaaagaaaacctaggagcccctaattcctcagattgtgcatacgcatgtgagcccaagcccaaggccctgctttgatgacactgagggccagagatggtctgattgggtcctaagtgcactgtgggagcttaagccgctcagggtcaatttttccagttggcttgttgcttggaagaacagacttcacctcaatttcttagtttaagctggctggctcatctgggtttgatcgcccttgtcccaagaacataacagtgtaaacaaatgacaaatgttttcatctgtagaagtagtaacagatagtggacagggattcctcaaaagcgaagccagtatgtaagctagaagatgcttccgaaaacgtgcttgtctatggtgctgaaatgctctgtcctcattgtactgccccacatttcagttcaaatcaagattatatctagttcattcctactcagcgttatgagaagatatgcaaagaattaaaacagaacattatgcctagacttaaaaatcacacttaaggataggcatgatagacgtataaaaatgtttcccactcaacactgaattccttaaaccatgaacactatgaaatgtaatactgatgttaataatttgaaaagcggagggagtagcatttgtcttgatattccatgtttggtttcacgttccttttagaagagttccaatgcccaccctcacatgctgtcagaatcttcattctgctaagcaattttcaaaaatatgacgttcttgaagaagcctattgacaatcctctccaagtagagttcttaaaaactcaaattgctcctagaatctcactcatttctattggtttaaataattatggatgtttggaaaagatcaaattagtttatacagaggctaaaatatacatagaaaacaaagtccatcattattcattttgataatatcttaataatcttaagaatgtaacagttaaggaatgaaaacatctagttattatttacgtgtttaattttaagaagtaaaaagctttctcaagagttaaacaaacaaacaaaaaacaaaaaacaacctgcactgaaaaatcaagtcctcacgaagaggggaataatctcatgagggtgggaaaaagctgaatgagatctttttaaaattagctttgctacagatccctcatgttctttcactgaaaaattagaaacgatttaaaatctctagccagaccgagtatgaaatcttcatttcccttgaaacgaatttgtttttgtcttagatagaatgttggcagagtgtataaaagaattcaattcacagctgttccacttttttaatgtaagaaacattaatcaaagctttaagttataagcttttctcatgttgcttagtattccagttcaacaaagatcaatagaggccatcccagtgttccttgacgcctcaccaggaagcagaggcgtgattatgcaaatcacgctgctcctgcacctctgccagcctgcttatctcccaagccttctgcctgctgctcctggctccctgcgcaagtgcgtgcctctccctcttatctcccaacaaagctctgagaggcaaggattgaggccagcgatgttaaacaatgatgcatggctgattttatttgtaagtgatttatttcactggatttaattttttttcactttgtgtataagatatttgttaacaagtcagaataggagaagtaaggcagtgttcagagacaattgacacaggttagaaatctattaagcactctaacagtttcatttaaagcagtggaagaagaaggaagctcctcactgagaatctcaacatgcattggctaaatatcccatttattctctgaaaggcaattaatctgtaattatatgcagaaatttacaagtaataattctattatttgaaagaaacacacagtaatcacataatctgtttaagtggcaatacatgtatttttccccccaaactggaaatataaaaagaataaaaacctaaaaacaaggaaatctatggaaactttcacaattttccactggccctaataaatgaaaattattgtaagctagtttctaaacgggttccacaccaggtgctgctccggtcggcggcttgtccacatgacacaaaccactccagagagacacgcacactgcactgctgtaatgatggaccccgggacactgtccttccatgtctcctgcattaatccctgaccttcgaatctcggcagcataatccccatttagcattagtagcaacggcttccactgtgaggaactcttttttgataagtaagcactgattcgggcatcgcttttaaacagcatattcccagctcagcaagaaacccacactcctgaatgaaccggagcacattactgagaaaaagttcattaaccttgctagatttgaaggttaacaggatagctgaagaaaggaactgagtgaacagctcgaatacaaaacaaattaaaatgaatgtcatcattccttttgatattcattagttgattcagagggagaatgctcttcttaaatttgcaaagcatttatctgtgaaaaacaggtgtacatctgctgctcgaatgcgtcttaagcgcgtgagagaagaataatgtagacactcacccgttccgctgagggagtagctgggagagggagaaaagacttgggctgcgaaatcctcgaatgtcattacttcgcggtggttctgaattattgcttcgagatacagagctcgctcttcatagctgcggtaatcggttaaggaaacaagtgcacgtgcaaagtggcatgcagagcagtgacagaattcacttttaataccgttgtgcaattttttctgtgtaaaaaagtatcctgcaggttctttaccatcttgcagaaaattaagtattagtcataattcatacccaaattctggttttgagacctaagtttctcttagactttaattgcattaaatactaataacactaaaaaacatgtaaagcaacagttacagaataacatcataagatcattagggtcgatttaaacaaaaacaggagatactgattgcaatagcatctctttccactgacagtggtagatcttttacatcctatttcagtggataaaacattcttagcctactgacatatgagttgatacttcaagcaacttggtgatacgacagtgcagacgcttcttaaaaataagaagatgcaagttactgggaagagagaaggctaggaagatagattctgagggggcatcagagcctctaaccaagacaagctgtgaacattggaaaataagaactactatgtgagagaatctaccaagagtgcacagtgcaatttaaaaaaaaaagactactgccttttaattaaaactgcagtctggaacacacagcattcaaatgtgtaatcaaaaaccagtcaccaataaaacttacaagcgtaacacactgaagcaactttccagctgtcttaataggacccctgcgtgtggcaggctttcacagggcagaaagcaaatcttccccttttgtgtgtggcttctgtttccttagaaggtgaatcatgcacttccaataacaggataacgtcagaacaatcccacaatggatggaggcactgcacatacgacgttatgaattaacacttggggaagtccgcatgacgtctcattttccccttcctcattatcaatgcaaaagttaaaagacatgtttcagtcgttttgaaaatcatgctaattctccgggaacacagggaatgcggatcaccatcagtttattattggcagctccagaagaggaaaagtaactctagcatttctcactacattttcaaactatcttttcaaaatggcctctttaaaaatacaagttggtgacaattatgtcctttcaatcagccttcaagacagcacgtgtttttaaatggtcaaatacttttctgctttcttatggcaaagtgtgcacaccgatctctaaatgcaggctcttcctctccctactccttcagttatattcagaggataattttcataccgtgaggagaccagaggcattctagggctgtgctatcccatacagtagccacaagccacacgtggatatctcattttaaatctgaattaattaaagtaaagagctaaaattcagttgctttgcccctccccccaccttgctatattttaagcactcaatagccgcacgtggctaggggttctatactggatcgcacagatacaggatgtgcctgtcaccgtggaaagcactactggacagcgtgctgccagaatttctccgtaagtttgttctatacaacctcaagcaaggaaaatgtgtttgaagatttccaaagtggcccctctaatgatttatgatcttttatatagatgggcacaaccgcccaaggcctgggcagcatgagcctgaactggcttcttgactgtgggctgaactcctggtgactcgccttaatgaacaggctgccaaacttcctcagcgagaggcgcctgctcaggcccaattctagagggacccactaatgccattcacgtctcattatgaacacacttattctgcacagcacttggctgtcgccacggctcggccctccgtgcatggccccagcaagccgctggtccggggaacagcaggacgttaggcctgagtggccgtctggcgaacaggcactctgacactaagctggcacgtgctggcccagcaggggctgagcgaggcgtgacaaattactcaaagagctgagctaaacttatggctgacaaccacctgagcctttggaccgccgtggcccgctgtcaacgctcaattcatggctccccctttcagtccatcgtctgcttgtgggcctgggttagagcaagcacgtccctctaaagacctgtcatgctctgcctagcatcgtcctgctgtttcctcaaaggccccactgcgtccaacacatccacatacagtgcttgggacaatggtgaacaaaaaggaaatgcgtgcgcattttgctaactactctgcggaagccacgtatctggaaagtggctggctatgttaatcaagctcatgatcaaacctacaaagggacgttttgcataataccagatgaactgaccccagacggcagcccaccgtcccaatcctggatggcactatcataagcttgttcttgtcataagcttgtccttgtcaaggctgagagatctgggcaccttagaggaagtccagcactatatttagaggagtaataatgaagttgtgagattctctgattcaatgaatatttatggtctgactcctaaattaaggcagtaggagacagaaaacataaaggtgcttccagaactggatcctggaggagcaagtgtttccttcatagaaggttcctgaccctgccatgcatgcccccgactgtcacacacagcccacactctcccgcccactaactggagtgttaacagtgctaaactgggtgctgtcatttagacaaacatccattagggattggggtgagaccaggagatcatcaaatacattttcgctcatggcccaagccagggcatgtaaacaccctgacaaagagaaaacaaatatccccttagctctggcagcgtttagaaacagccaaggagcttgtgggtgccaaaaatcatttcttttagtagccataaaaaacacagcgctgggatcttaactgaattaattgcaagggcaatttggagcagtatcatctgacattttcttatctaatatccttagggcttcaatgctggttgctttctataacaaagggcatttataatctagacatcaaaatgcttgtaagcttttcacatgtaagacatgttaaaatgttaagtgaatgctgaaataatgctgatccctggacggtcaaagacctttcactgaaagaggcaccaggtcaccaatccgatccctgtttcaatactagccatggcccttttgttcccttaaaaagtttactaacaaatgtgtaacttttaattctgttctgaattattatctcatgaaaagccacacacaacaaagtacttttttaaagagcagttttcccctggattactcaattcagggaacattcaaattactgaccagaaacccatcttggcttctggacatttctcagtttctttagccactcattctgttcacattttcacatatgaatttttatcaagaattttgattaagagacaggcctgtagtcccagtgactcaggaggctgaggtgggaggatcacttgagcccaagagtttgagtccagcctgggcaacatagcaagattctgtctctagaataaaaaataaaaaaatggataatattcctctactttactaaagaggttatacgcctttactggttacattttatcaaaaatttccaagagaacttctcgagactctcaagacacaccctgctgaatctgcagagctgtaagaatctgagaatctgaacctgtcccccaactttactctcattattgtttgttttaggttttagaaatgacagtagcagcatgacagtcaggaaggagcttgtattttggtggaaggaaggcagggtttgaatctcagctgcccttttccctgctaggtgttgatgtccccattttacatgtgagacagctgaggcaagtggttccgactccagcctcagttgtcctactaaatgtaaaatggggacaacaacgcctgttctcaggacggctgggaagattaaatagaatcctatatatgaagcatctacctgggttccagcacaaaaagaaaagcatgataaatctggattgactcctccctgcctctaccatgtgggcctagggttttgttgcagaaagaatgtagtaggtaagctggaggagagttctgtgtcaggctccatggcaagcaaaccccctttaggctacaccctcatgagcagggaagtcctgtggtctccattttactgatcaggtaatgagagctcagagagttcaagaaattttcttgaatcacagtcacacagtaatggaattaaggctacagcccaggtcctctaacctttactgctttcatctaatatcttgaattctagaataaatggtgttaagttcaagatcatgtgtgaggatgggaactaaactccaaatgagacaaatcaactgacttaaatatacgtgagctataataaccaacccgcaacgtaaacctgagtgcgtatgtgtaagctgcatctatacccagatcatgctgactttataaaatacaacaaaacaacaattattccattttaatttctttttactcattcgggctatgtgtttgttgactgttgtttagcactatcaagcttcttttatcaaagaaataaagagaactgtctgtaagaggctatgttgcagactgtattttttcaacccttgaaacccttcttgcctgaaccttctctaaatttcccaagagtggacatgacgctcagactggcaaagtggccccggacacaggcagcctcctgacatcagtgtgtgtgtgctgtaacagtttgcgtacccacctcagttttctttctgaactcatgcagcctctaatcactggcacaagcaagcccagagctagccattctcatgactctaactcccatggcagtgatctgcagaggagggaatgtcatgtttcagaaccacctgggacgcttcagccatccacgcatccctctcaaaagttctggcgcccccgagttctgctgccactgttccatcccttgagtacattagggtgtgtaaaaggttgaaaacctctggctaaatagctaccacgtatgaccatcttaagcctccttatgttagttttctgtggctgctggaaatgaccaccaactgggtggcttaaaacaacagaaatttattctctcactagttttgggaggccacaggtccaaaatcaagacgacagcagaggctgcaggagagattttgttcatgcttcttccagttccaggtggctgtctgcattcacggggctgcatgactctcctctttgcttccatggctacatggcctcttcctattctatgtgtctctcataaaggacactcctcactggatttactgctctcctggataacccagaatgatctcctcatttcaagatccttaacttatatcagcacacagccttgagtcaaatagttaacattcacaggttccaggaactgggacacagacatatggttttttgggaccatggtttacttcaataaactccttgaggacaccatatgagtcaggttcatcaaatttatgtcaagagaaatttattctcttacgtcactcatacaatctagcttaaaagcaccccacataatatttactgaatgaataaatgaaggcctgaaattcgtgtccattgctttaagctatgagacagctagatatattctaggcaatagcaacttgtaaggagaggttagagagttcaatttgaagtaaaattatacacagatttagaaaactgcgtgataaaaacttttagaggaatgtatgggggcaaactctttatgaccttggggtatggaaaatctcttaagaaaccaaaacatgaaccacagggagaagagactggtacatctgaccacattcaaagtaagagctcctgtttaccacaatactgtaaagaaggtagaactactaggcacaacgtgggaggaagcatctgcgactcagagctggcaaggggtaggtgccagaatataagaagaacgccgagcaaatccataagagaaagtcaaataacctactagaaagatgggcaaccaagagataaaccatgactggcaattaagttgctcagtaccattaatgatcagggattatgagaattacaacaaaataccatcttatatatcccagagtggccaaacacagaatatgtaataatgccaaatgtcagacaggacatgggtcacaggagccccaagaacctgctgctgggaggaactggcctggcttcttgggagagcaatctgaccttatccagggaagaacagacgtgcgtgcttgcaggctggcaattccgctcctcagtatatgagctctggtacatatgtgcttggttcagaatgattataacatgttacaggcaacagcaaaaaaggaaaaggaaactatttttaacattcatggataaatgcagtcacacaatgggatattatatagcagtgaaaataaatgaactataggcatgtgtattaataaggataaaactgaaaaccatgctcaaccaaaaaagccagtcaccgaaggacacattgagtgcaattctattgctatacattatttatttatttatttatagacagggtctcactgtgtcacctagtatggagtgcagtggagccatcatagcttactgccaccttgaagtcctggactcaagcaatcctcccacctcagcctcccaagtagctgggactacagacatgcgtcaccatgcctggctaatttttaaaatattttctagcaatgaggtctcgctatgttgcctaggctggtcttgaactcctggcctcaagtgatccttccacctcagcctcccagagtgctgggattacaggcctaagccaccttacctggcctatatatattttaaaaacaggttaagtgaaacatattgcttagggctacacacatatgtaggaaatgataaagagcaaggaaataataacctgggattacctctggggtgtggaggggttgtacctgggaggttctgaaatatattggctggtgcaagtgggtgtcagtaccgggacgtgttttagtgttccttagaacgtatgtaaatgacatgtcttctagtctatataaatatttcataataaaaatgggcaatttggccagaatgaaacagcactaatcaaatgaatcttttctcacccatcagaaggacagaatgagcttcaagtcgaaggttgatataaaaggtctatgtttgggtgttagagttgacgatgatcacaaagaagtccatttgactcagacacagagaaagcagaaaagagacagtactatttttagggatttcatttcagaaatagaccagaatgtcagagctcaaaattttcagaaagttgtggggaactctgacagaagggattcaaaaagctcaaatcaaacatggatacgaatgccacctgtaggggagggggataatgctccaaaaaataaaaatgtatttctacaaaattactgttgttagaattactatgcattaagaatgacaaaaccagctgaatctgagaatggtcagaatactacatatattcataggcttaagcatagatttctatacattatcctagtctgctcagagaactggatctcaagtggctgtgctattttcaaaaagcaaatccaccttcattcaagcgctcatccattcaagagatatgtattgagtgcccccctgtgctaggtaatgggcatgtaatcaaggaacaagatagatgtcgctcctgccaccagcaatcctgcattctagcagggaggcagaccgaacactagttaaaggacaagtccagggaataaggcaaactgtcattatgtcagtaccaggaaggaaagagggagataagctcaaagaagtctctgatgggagggaagcagctaaccaagcagggatgaagtggggtaaggagtgtaagagcagttcgggcacagagaatgccatgagcgggaaggaagttgggatacttcaggaggagaaaggagactggagtcatggggtagtaagagggtggcaggaggtgcagctgaaagacaagctgggcctgggcacaggaggcccgaatggcttgaggcaaggaagcaacatgatgtcacttaagttgctatattgcccttagaggaactgcaccactaaggagggtcctgagtgtcctctagtttggaagaggtcaaggctgactggcatctatacgttcaatcaatgggcttgtccaaatatttcaataccttacttattctttgcatttttcagaagtggatgacatacaacttttgggcatgtggaagaggtaagaatgctacttgcaggcttgaaatgaccagaacttctgagaatgaccttaagcataaccaggaaggactatggcatggcagagagagggccatgctgggtgacacacacaccctggcgtggagggaagaggaaatggagcagaagcaggctctccggtgaggcagagaatgaggcactacacacaaggaggcaggcacgaccctcccacaggacagatactgggctcacagatacttataaaaatgagatgagttaacagcagctgtggattgaggaatagtaccctgtttcgaatgtgtgaaatacacccacggatgcgttttaaacctagtaaaaaaaagaccctactgtggcagagtctgagctcagagaaggaatggctaagaatattttacaaaactaggaaattaattagctgatttcttctgctgctccccactactggccgcttttggtatagaggatgcacaagaaaataacacgttttcatttttgagcaatgttttgagtagtgatgaaagaaagtgaagaggcaacacacagaataggagaaaacatctgcaaaccatttaagtgataaggatcttgtatctcaaatatataaagaactctcacagatcaacaataaagacaaccaagtttaaaaatgggcaagggatggatgtgcatagacatttatccaaagaagatatgtaaatggccagtaaacacatgaaaagatgctcaacaccacaagtcattagggaaatggaaatgaaaactataataagatacgacctcacgtctactaggatgactataatcaaaaggacaagcgacagtaataaccagtgaggacgatgagaagatgtggagaaattggaatcctcataccttgctggtaggaatataaagtgtggccacaggccaggcgcagtggctcacgcctgtaatcccagcactttggaaggctgaggtgggcggatcacctgaggtcaggagttcgagaccagcctgaccaacgtggagaaaccctgtctctactaaaaatacaaaattagctgggtgtgatggtccatgcctgtaaccccagctactcgggaggctgaggcaggagaattgcttgaacccgggaggcggaggttgcagtgagccaagatcacaccattgcattccagcctgggcaacaagagcgaaactctgtctcaaaaataaacaaacaaacaaacaaacaaacaaagtgcagccactgtggaaaacagtttggcagttcctcaaaaagttaacatattatccagcaattctactcctagaagttcaatacccaagagaactgaaaatatatgttcacataaaaacttgccaacaaatgttcataggagcattattatttacagccaaaaaccagaaacaacccccttgcctgcaaactgatgaatggataaacaaaatgtaatataacatataataaaatattattcagccataaaaaggaatgaagtattgatacctgctgtgacacggatggactttgcaaacactatgctaagtgaaagaagtcagatgccaaagcccatatatcgtgggacttcattaatataaatgtccagaataagcaaattaatacagacagaaaggaaatcagtggctgcttggggccagaggcaggggagaatgtggcatgacagttaatgggcattcagtttctttttggggtgataaaaatgttgtggaattggaagtggcaatggttgcataactcagtgaatatacaaaaaaccattgtattatacattttaaaagggtgaacgctatggtctgtgaattatatctcaataaaataaatgcccccaggctgggtgcaatggctcacccctgtaatccccagcactttggagactaaggtgggaaaatcgcttggggccaggagtttgagactagcctgggcaacatagtgagaccctgtctctaatggcacgtgcctgtggttccagctggtcaggaggctgaggtgagaggatcgcttgagcctgggaagttgaggctgcagtgagttctgatcatggcattgcactccagtctgggcgacagaatgagaccctgtctcaaaaaaaaaatgccccccaaaatgcctagtggtacgcagtgcacactatgtactgtgaggaaggcctgctaataaaaagatcttcactgaacacatgagagaacaaatggcaggatggcctggcacagcaaaagccctccaggcagatagtggctgaatcatttaagcatggaagacacaggaagagcagaagaccatgtgccgcgactgttctagcagctggaggatgaaaaagacatagtcttgtccttcacagcattcacagcttatatggaaagacaagtggacaacgagctctaggaagctggtgggtggagcgattcatgggaatgaggagtgggtcttcgtcagactgcaatgggctggttacagaagggaagaagcaacaccagcctgtggcaacttggaatctccgaaggttttaaaacagatgaacagcaggacctgatctatgcctgagagataatggggcagggagacaatgcaggggaggaagcggcacaatgcagggcagacccagctggacttggggtgctcaccaatggtaagagatggagatggattctggacataaccctgggatcaaggtgtaagtgaccaggagggtgggacaaaaagggacctgaggaggagggcagggttgagtggaggagtctgaagagcccaagggattcctgggggacaacttcagggaagtgctgactgggactcagcagagaggcctggccagagctgaagagctgagtcatgggtttggagatgagcttgaaggagaaaaggggagaatgcaatgttagggaaccacccccacccccaccagagggtgggcagaagtgaaagaacagtcaagggatatggagggagcgggagacagccatttcccagatcctagggagaagcatctggaaggaggagcagcagggttcctgcagagcctcagctcccatgcacttccctggtacctgcctcaaaggcacatgctccacaggtgggctcaggtcgcatttaataactaaacaaatggataaaattccataatgagcaagacaggaacagatgccagttacatcctaaagccatacatcattttcacaagattttatctctctttcaatataatgtaaatttaaattctaggactgtttaaggccacaaataaatgaatcattgaaagtaaatgtcacagcctggtaacaggtaaagaggatgactttactcaacaatgtaaccaaataaaatggatgttttggaaaaggaaattaaacacatggaggtataagatattagattaagtttcaaaccctaatgatacactcctggagagaaacagtccactactgctcaaaaagaagaaaataccatataaccaagtttaagaataattctgaggaaatgataagagcaaatggaaatgagaaaaagattttcttcaggctattaaattacagacttttggagatggtctgttctcatattcctatgtccttccggcatagggagctgaaggtctccctcctagaatccgaggcgctccacacatgcaacggatttggactatgctgttattagaaatgttcaaatcagttcttcccaggggattgatttgtgaaggagcacatccttaattatagcattttccatttccatcttctccaattctcccagtgcacctcaccttctgcaaatcaccaagtgagaaaatgccccgtgacaccgtcgctcaaagtctcacatcagtaaaaatgtaagtgacaagaaaattcgtcattcagcctatttcaagtctagagaaagtgctgtcaaattgagtgagaaaagattcaacaggctacttcaatgatgaaaacgacagaaaaagtgacgaatcaatatgaacaatagaagccctgagttctgccatgctgacgccaataacttgatttctgggaggaagggagtcaatgtcacttgaaccgtgtttctctttcacagattttcactcgtcctaaagacatcatatgttagaagctaaaaaatgtactcccaaccttaatatagaaaggaccactgctgacatttttggggcatttaatatccatgaagtgacaacaaaacggaaaataattagaaatgcagaactgacctaatgttaaatgatgagttaatgggtgcagcacaccaacatggcacatatatacatatgtaactaatctgcacgttgtgcacatgtaccctaaaacttaaagtataattaaaaaaaaaaaagaagaaatgcagaactgcctctaaatgtcttaaatcctgtttgtggcaaagtataaaaagagtagacaattaaagagcaacacacatgaattgtaaactctgtttctatcatcactgactctaagagaaaaaaatattattaaataaaatacgttacaggtactatttagtgcaacataatttgaattgaattatccaatgtttactcttcgaccattctattttgaaggcaaaagcgactttcatttggcctacagaatagttcatatctaggttgattctagaaattaaataggatcatgatatatgatatacgatagataacaagtaaatgaaactgacaagtataagaaaacatctatagcagatactctggttatccattcctttgagacattcttaattgttacctataaacaatctcttaggcccacgtgaaatcagactaggctcaggcacgacacaactgaattttgtggtccaaagtatttgcaccaagttgtgtacagattttcttcgtttttcatttctgaaagcaattttggggaaataattccttttcatggtatttacaaaagtttagctttatttgttttttcttctgtgcgttttaaaataataaatatcactacctctggaagcagaaaatagtatttctatgcttctatgaaataattttaatagcttaaaggcatctcagttttccaggaagatattcatctgataccaagttatcagatgtcaagaagaaactccaagaaaagttaggggtttaccaaatgaaagtgacttacaaaatgaggaaagaagctgatgtgaaggttgccaagcggccttcctggccgattcagactgcttgagtggtacgctgggttgcaaagcacacctgagtgataaatattactgctgacccacacttgaaactcaatacaccccacagacctatcagagcaaaaaaaataatgccacaattattgaaacctcactggaaatttgggggaattctaataacacaaagctccctcatgatcagaagtagcaaaagtatgttggccagttaatattaaaagcaactgatttctggctattaataacagcatgtgatgcaactggctcacttaggaagaagctacactaagtggacacaagggttgagccatcacaacaaacggccctggagcatgtctttatctgcagcactctgaagagctgctccatctgtaggcatggctgggcccctcaacagacactggtcctgtgcaaaccagaatgaccagatgagcgtggagaatatgggtctcattaatgttatggaaagtagttttgagcagccacagggcaaaagcaactcttttactccttttacatctgttctaacatttggttcactgttaggttaaaaaaaataaagatgatcaggaagtatatataagtgacttacatagtgtggtttgaaatttttatgtttgctgtcaagattggtcatgaaaattcccaggggctgctggaatgacttactctggtttcataacaggctcaattgtactgttctacaccttctgctaatctggttctaggctgtgtaaagaaaaaaatatacacatatagctctgttgaaaataatgagtcttgatgaaggtctacgtgtttgagtggggtagtgaagccacctgtttgctaacgagtctctggctgaagggcactgggctgagaaccccacaaggtggtcatacagccctgtgatgcttctgcttaggggtgaggaagggaaacactgtaatgatcttagaggaaggcttaagaagcaacagggctcaagtgtgaagttcaggcatcgtcactgacataatctcagagatcatcagcaacacacagcatacgggatgcccttttacgaatgcacctcaaaggaaaaagtccctgttctgacagcccttcaggtgtggcgtctgcagcaggtgaatcagactacatcctgagcataagtgagcccccggccaggcacctctgctgatgctgcatcaaccaaagattacatttaaataaagatgccaatgaaaatgatcaagtgcttttaatgggttgaagttttataggctctatctcatttaatcctcacaacttccttctgtggtttgtactatcctaatttttttgtagaggaggaaattgaagagcagtgaggaaaagtgttctgttccacctctctcagatgctaccagcagcctgacttgagagcctggctctcagtcacggccctgcctcttatgatcagaattctcccaacaagagaaaagactagtgaggccaaaactagcagaagacccagttccatctactcactgctgttttcatagaaagctgaaggagtaaattgtagcccttcttccactctctccagttgggactctattatccaacaacttcaggtgaaagaaaacttactgtgttttctcctgcaaattaaacttcaatacttgcatttcaagtatttttggctcttacaagccagtgagagaaatccctgtgggttagagcagaggcgggagtgacagtttcactaaatcccatctgtgtgccattctgcttgcggggtgggagcgtctgcagcacagcacatcagccctgcgtcctgcacttattcatgcagatgtctcttcccctgtcactcatcccttcattagaactccctccgaccggctagcccaggggctgctgtcttcctgcccctggtcctggtgccccgtttcaagtggtggtgtacagcactgggtgccttgtgtgtccttcatgtcctccagtgctcctgggcaccgttaccatgcacctgctgcagtggcccctcggcttgcaatttgacgtgaggcactgtcataccagtgaccgcacaggttgccagtaacaggaaagcaattttctattgagctatgactatatctggcccaggatggattgtgcaagggaaaaaagattttttttttttgtaaggggtgttttcttttgtagctggacaacatatatcatcaagtgcagagcagatacttggtccttcctgaatctgacatttgaacaacagattcaacatttctactccatttcagcaggtacctctgagtacctaaatcttttcaacttttaagagtaaggcagaaggaattcaggttaaaaagtctgctgcagtcagaagagagatcagaattagaaattctctcataataacacatgctttaaaaataaaatttcagaaaaaaatgatgggtgtttatcttaactttttatgtctttatattctgggataattctactttactcttcaatgaaaactgtctgcttttatattttatatgcaaaattccttgtaacagatcccatctattctgcctaaactcataaaatatacaaataacagaaacagcccccagtgctgttaaagataaaattcccaacccacacaattctctgggactttccacatttaagcctcatagagtcacttgatatcatcttcgtgactaaaaatataactgcagtattacttaaaattataatcaaatcattctcttgcaaattaagacacttactcttagaaaaaaaaatagccaaattgaattcggtacgtcttttcttgatagatcaaaagcagctccattaaatcagcagttttatattaatggcatgagacatgacccagatgaggaaaatgtcctttggagccattttgtattttatttgaagagccatggagatgatcctcacaattcatatgtgaggcagaattgtatcactggtctcaaggccaggaggctggacatgatcccaaatgtggtggcccatccacatcagagagcccaggttcatcttctctcaatccctcatttcttcccattattgtgcctgccacccatctattcacccacccacccatccatccatccatccatccacccacccacccacccattcacccatctactcaccaacccttccatctgatatttactaagtgcctcctacatatccattattctctcctcagatgtaaggaaagtacttccttgcatctcagccctcctctaaatctttgatcctataatattcaaatgttgtactgagtattatagtatattggaggattctaaaacccatcatagtgagattacactataattagcctgagttctgttggggcaacatctcacttagaataaaagagacaatctctatgaaataaaaacaagctacccaatgttggtgcagttggctgccactcatgaagctctttgtagccaagagcccattgggtcctcctgcaaaactcaaaccacatatgataaagcagagacaggcaacaaaagtgatgctctgagaccacccagctagcaatgagcagggctgaaactcaaacccagggcgatctgttacacatgctggcctcttcctactcccttatgctgtctcagtttaatctttcaaacttatttaagatgcttgcaatgttcagtgctaaattaatccacaaacattgttgtttggtgctaacaggaagaataaggatagataaattagattcttctttctccccccagaaccaagagtagcacaaaactggccatttttatagctaatctggaataaatggtgactttctagctaaatcattatctgtacaattgtcataagaagctacaatttagaggaataaactacattaatttgattctttccttcatgcagcaagatttgaaaaatttacatgacctcatttacacaaaaaattatctttctgcaattatttccagtgatattttgaagacaatcagtacaaaattctaaagttttcttaattattttgaatggacattttcaaagagagaatgaatttggtgccagatgtggcttctgaagtcgtgacatgcttcaacactggagagcagagcgtctcacggtaaaggccttttgcaccataatcaaaacactgagaggaacaggaatgaactgtcattctttcattgctatcttccaagggggtgaaccatttctgataaatccttatttttaattatgtgccacttggtgtcattcaaaaaccctgaagagggtagaagcacctgtgcaatgactctgaacaaaaaagaaggtagaaattcaggcctgatatttcatgtgtcatcacagatagcagggttgaagtcaaagccctgagttcagatgcagactcctctgagtcctggccctgtgacctcaggcaactagtttgccctgcagaacctgcatcccctcatctgtgaaagaggggttcagggctgatctgcaggaccatgctgcagtgaggggaatgatgccacaggtgtgcctgttcaagatcacagcagcagctgctggacctagtggcacccggtcagtggaacctaacagggagcagctggcaaaacagcaacgtggagtagagccctggcattccagagtagggacacaagggcaggcctggatctcagtgccactcaatcactgactaccgtggccaggcatctggctcaaagttgtgggccctgtggaggcctagggcagcaagatctttccctttatgggaaagggccacatcacctccttgtcccatggcctgaatgcttcctccaacaggtgggggaatatttcatgagaagtgtttttctcaattaaaaacagaaacacagggaccagtgataaggagagtagtcattgtacatgatggaaacttgcctctacctatagcaggttctgatcctgatcaagtatactggtgatttactttgtagactgatgtttcaactgttttcactcatctccagtgaatattaaaaatgtcacttgagaaatttcctttgtatttctctactgcctttacctttcggagttccctgtgtctgtatgttgatagcagacacaagatctcactgttttcatgaaacatcacgtatgtacatcactgggatcacctggtctcagtatatactctacgtagaccccaaaggttaaggacagtacatgagcgagagaactttttaaatgcctctatatattttcaatcagaagtaattattttgtgagttcatggaggacataaagacgttaactcatggtccctatcgtctcccagcatactactgatatgacaggaatgactttgggacactcttcccagggcttcttggtggtgtgaacaaatgtgcaaggcatcatgagaaggaaatggctatacccttttggtgtggttgggggctttgtggagcgagtccccctgaagcgtagctctgagactgagtggaatctacacaggccagaacaggagtgatgggggaggcaggaggaaaacatcatggggcatttcccaagaagccatgcccagagaactggggaacacagggctccttaagaagtaggactggagagaggccggagtctagactgacactgctgttagggaagcgaggaggctcctgagggtagacagcaggctgacaatgcatggtggtgagtctggcagccaggtatgaggctggaggggggagaaggaagggtgccacagcacagagatctgtacagaaagccctggacacagccttggaaagtggctctgggcagagggagaggatcccaggcaggtagaggacatttcaaagaccagacaggtttaatggatgatgcaagagaaaaccaaaacttaaacatgcaccaggctttatataattttaaaatgtatgacacaatttgcaaactggcaataaattactctaaaattatccttgagatgggaggatggccatatgcaaaaaaattaagcatggtgactgtaggtaataatgtattatagatttcaaaattgcaaagggagcagattttaagtgttctcaccacaaataaatgtaagtatgtgaagtaatagttgattagcctgatctaatcaacctgcaatgtatacatgtatcacaacatcacactgtaccccataaatatatgcaattattatctgatggttccaaatgtcacttctatagcatgtgtgcacctctctatgcagccataatgtctacaagaggcctgtgtcccgggtttttcctctatgcaaagttgaagtaggggctatcttcaatgagaaacatccactaatattacttgcacagacttaatgggagagataaatgggttatacatcagttaacttgtaactaataataaattatattttggtcattaaagtcatgtaattttttaaagaagcagttggtgcgagaaacagtaaggactgtgaaataggaaccaccgttgttccaaggctggtgatcgtcttcactgtcagaattcatgagaggaagctatgtttattttcccttgatgacccgaccactatggaataaaacacgtaggtacattttctacagagacggatccaagactgtgactgtctcattgtgcctgtagtggagggctgccagggctctcctttgctggttataaggagctgccttgtgtcacaaaccaggtgattaccatgggttaaacaactaagggcagggtggagagtgaccaagcagtggctccctgagctcgtgacggtgctaaccttttcaaaggtgagcgccgtatatattcatttcagcaagtcacttaatgagcttttggattttttcagcacaaattaaaggcacctacctggatttttaaatcacttggtaatgccacctaatccccctgagtggaagaaaattaaaaacaagagccacagcatttccttagaacatcttgatgtaaagttaatgattctttgagagagactaaatagcagactatttcaatattcggaaacactggaaaatacattccaccatgctatacatacatgggaaaacaaaaaactatttatttatttagaatgattttgaaaaaaaaaatgaattctaatctctccaaatagcctcatttctgaatattttttaaaactagcccgcttcctctttttaccagggagaatcatcattatcattaaatactccaactctgcaattgtccaccctcaagctgtccatgtgaaagtgactggttgatctgactgcccagcagcacttggtgcatgggcagagcctccgctccagctgtctggaggtgcacatctggctcactcgtgagcaccaagaatctcctaagtgaattctccccattctaaagagcctgcattttaagaatgactatgcaaatttagtggcaagccattgggtcatttcatgtgatgccaacaaacatctagtaacacttctatccatttgtctctccattcagacataattatcagtcctactatgtgccagtcaattgtgtgcccaaattatcttgaataattctcacaaaatcctatgaagaaagtattgttactctcactttatagctgaagaaattaaggctccgagttcaagattaggtgataggcaaaccaatattagcaatttcatatggttccacctagtaatttaaccagagcccaaaaaggtggttgggcagggaggggcttctcatacaatatcttaaaagaggtgagagaaagaaactaggaggagcactcaaaccctgcaaggggctgaggggatttggagaagctgcagccaggcacaggatatctccagaggctgctagcctgtgagaaaacaggaataagctctttgatgtaaggtatcaatacaaatgcaacctaaaaacgcagtacttttctgtgcaagctgcaccaacagtttgacttatctcatgaggctgaaatgtttctcagatgaggtccaacaagtataagtactccccaaacaaacctactcagctcatttaaaataagcccttacttaaaaaggaccacaaagacctttgaccaaaggaccacagagacaaggtcagctgataaatgagatagtctggatgtttttgtgagatgaagacgatgctcacgaaggaccaggattagcatctctgcttcaccacacaacagacaagtgctaaaatacttcaaaatccagtatacatcagtgaaattccgaaatttatcagaacagaaagtagatcaaataacaaaatactgcatgatatgtattttatatagtaaagtatacttaacagccatgtagatgaaggttttggccatgttctttgtactcagacatggcatgcagttgtaagctctctgtagtagggaggaagagggagaaggggtggtgatgtactgggaagtccatgacttgttcatctgggggcctgaaaaagcccctgaaaaatcaaagctctagtaatttagcaaggtccagcagtgaggaataaagtgtataaaagcaaaatgaagacaaaaataaaacaaattttaatacacatggttagtctctcccaaacaaaagttgctcatagccacacacactggcctctcatgggaactcatgggaaatgccagtagttcctctgtgggggtcccgggaaaagtgcagagctaaaatccacagtcagcaacgaggccttggattttaaaattaataagttcaaagcctgatgagatggaaaaggttgtaaaaagcaccttaaaagcaagcagaaacactctcagtcccctgtgagctgtgcaggggactgtttcagccacaaccagaaatggatgcaggtgagcctctgatatcctaacactaaaaacagacggaggccaccagcatggccaaatgctcagaagtgaagaccaggaggagatgaccacgttctgcatgggatgtgtttgttttaaagcagtctgccattgcctttcatctgtttgggtagaggactatattaaaattcctcttagaggctgggagcagtggctcatgcatgtaatcccagcactttaggaagctgatgcaggagtatattttgaacccaggagtttgaggccagtctggacaacgtgatgagaccccgtctctactaacacattaaaaactagatgggtgtgatggtgcatgtctgtagtcttggttacttgggaggatgaggctggaggatcgcttgagcctgggaggtcaaggctgcagtgaactgtgattgcaccactgcactctagcgtgggcaacacagtgagaccatgtctcaaaaaagttttcttttagagaaaggcattcaaagtgaacttatgaaaaacaaatctacaagttattctcctgtgtcctaccccatgcccagaagctgacgggacatcacagagagatggctccaatgtggactctgttcttcacctacgattcttgaatgccatgtttgccaatgcttgaggtgcaaggtatctaaaagtggtggatactgcagacccttttcctcaaggaggccctgcacagccacctgggtgttgatgccagatcccctggctctaaactcagccctggatgaagaaaatggtcatgggaggcatgggagggacaggcgaatgctgcaacaatatggaactaaagtccatgacgcagaggcagaagcaacacttcagagatggagggtgttcaccaccctgggcagacagcgcgtactctgctagatgctgggagcagctgaggaaaaggatgcataacagcatctacagttaagggcactgtcatttgggggagaaaaatttacataaatgcagctaatacagagcaaaaaaggaaggacagtaaagaatgaactcttgaataaagtgtacggaatcatattatatctgaaggagaagagtagggaacaggggtcacacccttactagaatgttggctgctgcagagctgacaatgctgtgccatagcaaagtgggaggagcatgtgcgtctctccacttgggggcaggataaagatgtggcacagtgtgatttttagcaaagaaggaggcaggctgatgctgccccggagtcccagtgtggtgaaaagaggtggctctgttctcttcacgaagggaacgagggaccccgacactgggatgtgtctgtggacactgccacaggcaggaactgcactagatctatggcctttcagggactgctctggattgagctcacatggacaagaatcaagattagtctgtgagcaggattagtaaaaattcttagaaatttattgttctaagttctgtttaaatgaacaatcccataaatactgtagctgctcaagtcttgaaatggggtgagttatgtatcaagttgaatcatacaaaattgctgatttttaacctgcaaaagcagcatttcatatggtctaaccctaataccagacagtaacagattacttggaaaagcccgctgggccccagacatttccccgtctgtctgcctaaatcacagacctgcctgtggacattgctccctctctctcaggccactttgctcctcaggaaatacagcagcctccagcatacagtgcttccaggacccttcaaataaaaccccacgaagaaaccagagctactgaaatccttagtacttccatgttccaagtaaatcagatcaagttctctacacatgtgctttgcatgagttttctaaaaagatttcagtctatttaaataccatccctaccagataaaacaatttaatagggtagatctttctttgctcaaacacgttacttatctattccttcttccaatgccatccctaatatgaagaaaaaactggtagtggttgataaagtgtatttaagcgtcacggcaatacatgagtaagacggcaaagtgtccctgccatcagccggtcctgggccctggccaggacacaaaggcatagaacaccagcccagggaagccatctcacttcccctggggagacaaacactggatggctcacgaaggcttcaatgtgttgacactgtcgtctctgctgccataaggttggaggccgaagagtaatctaaatagaaaaaagaataaaaccctggcctagtcgggtgagtagcgttctgggagaggcaatgcgtcaagccccaggctcctggaagggagggaggcaggaaactgccattttgactgcccactacgtcctgccagacacactcatgtgccatgcctgatctaatccctgccacgggcgggcggccagggcgccacctcatccgagcctgtgcattggccatcatggcagccgcaccggggagaccaagctccggggctaactaactgacgggaggctccgagctctgaatgctgccggtgggaccttggcaaggtccccatcctccctgggtcctgtggcctcctctgcacaatggcatctgaacacaaaccatctgttcacatgggaatacataatatgtataatttcataaatgttagctcaataaatgttggcattattaattcaaacagaagttcacctcctgtaaatggggaaattaaggagactggcaaccacaaaccactctgaacgtcctgaagaccgcctggtcactgaggcacacatgactctgcaccctctgacatgccacgtctcatctggccacaaatccccatcaatccagaacctgaccacttgtcaccaccacacgccaccatccaggccacgccattgtcatttcgttcctggattatggctgtggcctcctacctcttctggcctctgtacccagcagcaggaggctttcagggatggtgccgtcctccgttcagccttcagatggctcccacctcacaggaaaagcggaagtccttactgtggctggcaaggccctgccccactgggtgcctgcccctgctgtcacctctgtggtgtggagcccttcccacacttcacacacacgatgtgtgtgtgctgtgccctctgcctgggatgctcttccaagacccctgtctggctgcctccctcacctccttcaggtctttgctcaaatgccagcttttctcaggaggcactgtgatccagacccttcattctccttttcttggcttcatttttctcctcagtactcaccatgctctaacttccctggattttcatgatctagcttgcttgctgtcagcctcttccactggaatggaagttccatgcgggcaggaactgtggtatatctagcacccagagaacaggccccatacctacagagtctcagaaaccactctcgcaggctagctggctgaaggaacaacactgcagtggttccagtggatcctgactccgtggttcttatgaatcccgcaaagagtggttcttaatatgggtcaatggaccccatggggatcttctgggtgatgatcaaaattccaggggtccctgaacttggatggtaaaaaagcacatcttcattctcactatcctatcctctagctgaaatgaaacatttctttccgttataaataggaacataccacagtgatactacctgtgactgtgtcaccagtagaaatcagatattttcatgacgcattatattgttaccagtgtctcaaaatattgattctgctcattactgcttcaaaattataatgattattggacctactactagagcttggtatttaatgcatgaataaaggcattcctatattactatatatgcatttgctttagaaagcatttcactataactgatgtactctggaatcctatatgctttatgttctgcatttacaaacattctgagaagtgcaagacatccatggcacaaagaaggttgagagattgcctttgggactgactccctttatcccttttagtgtccctgctaagttccagggtatgttcacggtacagccctcagaggcagtgatcagggtgactcagccaccagggaccacaggcagcatgggcccggggctgccaggcagtgcgctcgggactgcacgcacgccaactgtccaatctgggtttctagctccagatccaaagacagggtcaagctggggttgccaggaagactctcacatttgactgaaaacaaaatggagtttcaagctatcagactaaaagacggactaattatttatatatatgtatttccccccaaacaactaaattcatatatatttacttcatccttacagagtacttatttatgcaaaatggaggctgagaaataaatcctttagaaaaaaaggcgtaaaattgtgttgttcttctgacttcttgtttctcctgagcaaactttgggtcacctttcattgggaaaggcccaatgtgcaaaaggggaagaaaagcacattcattaggccactgtctctagcaggccctgtactaattacttttcgtgtaggatttatttaccatctcttttcccaggcatggaaacggagactaggagacgtgacctggcttggctcaagtcactctcccaatttattactaagtgccctgactgccatctgataatacacagagatgccacagacctaatattcatccttctaagcagtcctggttttagtttttttttttttgagacagggtctcactttttcacccaggctggggtgcagtggtgtgatctcaactcactgcagccgtgacctcctaggctcaagcgatcctcccacctcagcctcccaagtagctgggactacaggcgcacaccaccatgcccagctaacttctgtatttcttgtagagatggggtttcatcatgttgcccaggctggtctcgaactccagagcttaagcgatccactggcctcagcctccccaagtgatgggattataggtgtgagcgaccacacccagcccctggtcactttttacagttaggtatcactagagagactaaatacccaacaggaaacatttttctcatttctattttcccatgatagataccgatcctgggggagtgggctggggagggtgatgggattatccagtgaaaagccgcaggcaacagttcaagtccctctgaatccacagctacatgcacagcttcagagcaatacaaaacaggtaatttaattccataaaattatctttctacagttcgttttttcctcctagcctactgaaatgtacacaccatgagtacaaagtacaaggtgctgttcagctgtaattttacttctgcacatatttaatgtgctaatgggatgaagcatttcatggttcctgtgcttagcaaatgaaataaatcaatgtgttaagagaaagcgattttgttcttgctgtttggggaaagtgctctttactttcctattaacaaaaacttaatgaaccatttcacattcaaaaccccttaggtcataatgtctatttcttaattaagtttttacaagtcaaataatgctaattttcttttatatctccacacgggcagcagcacttaaaaaaaattactgagaataaacaacaccacagagtgaggactatttcagtgagttaaatatagatgcttgtagggctttataaaggaagatagagaaagcaaaatgacctggcccagaatacatgaagtataatcaaagaaacagggtatttgggttactatggaattcgggccaaaataaagttttttgtatggtgacgacttggaattttgcttcaaaacaggaagcataataatgctgacctgctctaagaaacagtggtcactgagtatttaagttctttttcttgaatttattttaaatttttatgcttaaacttcccagcctgtattaaataggcctaggctttgtacaatacagaaacaggtacttgaggctcactgctggttcgttcttgggccagtcttattttctttcatcctaattgcgcagacagcatcggagctttgtcagctttacctgctctgaatagaagcacttttggccccccttgtcaaagactagggaagaaagcccgcgctctggttggcagcagtcttggattctcgcccccggccatactgtgcaatcacgctgtttattccactgtaacaatcagacagcgagagcagagcacctggtactccccggcccgggccttccttggcagctgacgggcaacctcactgccaggtggtcgcgcttcaattacattagctagccattctagggttaacgaggacccactttcttcagaatgccccgggaaaatcagttattcataaaagacagtatgccttttgttgatcattgaacaatgttgctgaaaatccattaaattaaattctctttattgggctgaataatgcaatagcaatagccccagctagaagtttgcatgtttatttaccaaatttctgaataatttatacatggatcctggctcttttatcagttagtggccaaatgcttcttcggaatggagcagtgtagctctgccttcatcttaacatgcaccaacacttgcaaataaaaaacaaacaaaagccgaatttaatggagtggtcagaaagggaaatctcattttaattcagaattcacattccaattttcttttgcaagaggactctcacatattttggcatgaatttacataagatgctttttgggagctgtttcacatgaggacctttttcataacagaaaatgaaagagaaggaaacaagtgggaagtgggacagccgttaatctgtaagttagggaactgctgccaatgtttaggtggaaggtgaccgggatgaggtgagtgtgggtggacctgtggctagccttgttgaaacaaacaaacagctagaatgtcaccttgccctccctgggcctctgcagcagtgaccacaatgacagcagaggcaggtcaaggcaggacagcagcagaagcaagctccctcccttcagtcgtcagtcatcctctgcttctctccctcaagaccagcgggggttgctggaggagcactccctctctcctcctggctaatgctctaggttgcccatggttggagcactggccatcagcctcagatacagagctgtagagttgacatgtgctgggaaagctttaagtggaagaaatgtaagaaaaacaaagttacagaggtatcctagagtcatttaaatactgctgtcctagggatgtagtctgagctgttttggagatcattttaaaacaggatttttctttttttaatttagaggcagcatcaacagaaagtgaaattatcctgaagtatacattatttatcacaaataacataagacaagccaagaaagaaattctattggatttcactttcatttaagaaaaaaaatttactgtttttcagaaatgaaaaagagtatctgaataaatttagagaaaaaggcataaatattagttggtttgcacattcaaagtagtctgtgaaaatatttttagcaattagtgacaatgcagttggaagacagacagcagtggctaagagagtgagcaccaagccggggtgtgaattcacttctcacttgatggctgagagatcttgggcaagtcattcagcttctctctgtgctttcgcttctttcttgcaaaatgggacaacaaccctactttctagtgatggtaaagtacacataaaatatttatcacatcgtacacattgtaagagctcactaaattatgacttatagattggccaagagatacttggtgggaatgttctacactttcagatgccatgaggcatcttcactccgctctctgtcgtcttagcctaattcaagttatggccatacactcagctactctgagtcccttaatgtaaccatctcattcgtttcctttgcagtggaatagcacaaacaaattaaaactcaaagcaagcaccaaagaataactgtgttatattgctaatgaaatatctaaagcatggattgtaatcagacatccaaatataaatgttttagttttgctccctgatcatttctgataaacactttggctttgccttggcatttatcttcctaaagcagactggtattacaatgtacggttccagtaacattatctctgaattataagatccaccttgaacaaggctccagcacaaaggtattagaatgtgctgatgacaagcagacactcttctactgctgaaaaacaatggctgacacttctgtacgaacagacagaaggcacatcaaaggaagccttttacagagaaaaattgtgtgatgcccactttaatctctctagaaatctatgcacgaactgaacccaatttcatttttcacataaatgctaaggcttgatacaaggacatctttttctttacagttaaaagatgaagagacaaaagatacgctagcatagcctttgaactttttaaagctctatcaatggaccatgatacttaaccactgatacaagggcagagattttacaatagctgcatttaaagcattctgactaaaaccagtcattattatagattaaagaaaggcattaatatccacgttttccttaaagctgcatagtttttatacttttaaccctttgatcaattaacaaaggtctaaaaaggtaagattgtaataccagaaggatctgtaaaactaccgtggcgtggggatgtaatttgaaggggactgcattcatttcctggatgaggaaggatgcataaaaagcatctttttgggtgagaatgcgggaagcagtcctccagtgaatgaatggcttcaaactgagatagtccagatagtgactcttctgacattgcatcattttctgggggcatgggagaactatgaaacgatgtctccaggtgcctcttgatcttcacctttttccccttgtatctctggatccctcttgagccttggctgtcccataccaggtgcccctaaatgtgaagctggtgctatttgtcttttatagttgcagccacctcaatcttccagcatccctaacttctttctgcctgtcaggctgctgtgcaaggcgtaccacatgacatcctcataaggtggagtccagctttgtggtcagaatgcctgtgcgccaggcccaccataaccattataaagtgcttgaggaagtcatgtgactcctctgggcctgtttccgcatggctaaatgatgaacacagtggtgcccacatgaagtgcttagtacagtgcacaacaaaagctaagtcctggatagctgttagccactattctcccctctcagatctggaagaaaccatgggggaatctcgagtccatctctcacagcagcagcaatcctttcttcctagtccttgggcatctgtgaatccctgctaaggggctgcttaatgccttagggcagcagctcccattcctggctgcgcatgagaatcacctagtggttaatcggcactgatgcctggcccccattccaaaccaagttacccagaatctgtggggtgggtgctgggcatcagtcaatattggaacccccatgtgattatatgtgcagccagggttgggaaccatggtttatggcaacacaacacacacacacttcctctggaatcctcccctctgtacagggccacagaatgggacagaaggacctccaggggcctgtaagcaagaaatgtgtcagatacgtgttaaaaaggaatgcaaattcacggcttgcatttattttaatacaaaaatgttgtatatgattaactatcaagtactgctgatgatctgcaaaggcacgctgtgtgtctcctgggactctcctacaccctagcacatcacctcgtttcccaatttgaggagatcttacttatttcaagaaattttaaaactttttattgacaaatacacacacgcacagacacacacacacagtacacagaagtataaagctcaatgaattttcacaaattaaacacactcatgttatcagcaccccaataaaaaatcaccagcaccttcctgctgctttccagacactctcccccttactggaaggataactcctctcctgatacactgcagattagcctagcaaatactgtcagtttccccaagtggttgattgagccaatttacattcccaccagcagcatttcagagttctagttgttctatagtctcaccaacacttggtatttttcacattaattttaatacagtagccagtccccccttctccgtgacttccttttccataagtttgttacctgcagtcaagcaaggtctgaaaatattaaatggaagattccagaagtaattcgtgttttaaactgcacactgtctgtccttttgtccagcgggtccacgccgcatgcgctgcctattagtcacttatcagatcaacagccacaggatcacctgtgttctgtgttgcatgtgcctgtgttcgagtaactcttattttactcaataatgtccccaaagtgcaaaagtagtgacgctggcatattgtcataattgttacattttattattagttattattaatctctttgtctaatttagaaggaaacttcataataggtatgtatgtgtaggaaaaacgtagaatataaaggttttggtactatctgaggtttcaggcatccactgggcatcttggaatgtatcccctgtagataaggggaagctactgtaacttgagatgctcgaatgtaatgtctgactattccataagtgcctgagttttgcaaggagattcatgaagatggaagcctattacacccaaagtgctgaattttgcatggcagaaaggcagatgatggagtaaatatattggtcagatgttggttctgagtatgggggccactgaatgacatttactctgttcttggaactggaagctggggagatcccccacggaatctaatctggcctttggctccaactgtggccctgactagtccacatcactcagaaatgggtgcttcttcaaattcttgtttttgaaataaaccataacaaaaaaaggccaatcaacccacccacccaattaggctattttctccatggctggggatgggtaaagggatctatagcatagcctccaaacagtactttcctctcaatgccaaaaaacttctgattaatggtcaaacaggttcttaggaattacacttccatgtaattttcattataaataaatttaattgcccaatgtgtttaatatttttagaactagtatgtaaagaagtataatcttaaaaagaaaaactggcaaaatccagcaactgctttgaaagaagctgtaagatttgaactcaaaagcattttctgaaaagctggactcagagccaaagctaatgcattctgctagcactaaacaatgcacatttgctttggaaaaaacatttttttttttaatgactgaatttacaaacatagtccattttcttcttagagctaaagtatcatctctcttgctggggcactttttttttttctttttctttcaaaatcctctttaacaggagctgtggttagtaaaatcttatattcttacttgagcatatgttcttcatagaaacccaaactgtgacctctttggattgctgaatgaatgtatatgtttctagttagtaagtgtgaactgttaaaactcacataaaacacaaaaatttgagatatccccctctcaacttccccattttgagggtttcacataaaaacaagtgaaaaacatttagagaaatgaaaaaacattctgaatatattataaattggttaaacacatatgctggcagattatcaatcttttgttttgaaaaccaccacatcatcttacagtgaaagaggtaaattttcaaactattctgctgccattacttttaaaggcaaaaaccgcaattacttttgcaccaatctaaataggttttgaaatcaacaaggaggagaggagaatgatgattaagaggagaacagcagccaccagaagcaaaagaaatgacagtaccttggctttgcaggattgctgtggaaagcaaatgcattactacgcataaagagatgaatgacactgcactgctcagcactgccctgggttatacaaagctgacctgcgtggctacaggtataatgcagagggcaaatattccactgggcctggtggttctacataaatgataaagtgagtgacttcctgggttgaactagttcctgcagattcaaaatgtgtctgaggctgtgacagggtgaggacactgcaggcattctctggagtgacaagtcaccgagcctctttggctggctgtgcccaaactcgcacttaggaaatgttctaaggccaaattccactctggaactctcaggctgccatagttctgctaagttttagtttgatggcccatttgtcatgaagtcaaaccccagttaaactgatttctcagctgattggcagggatagcattttaattatcttgcttgtagatttcaacattttaatacaattgcatataaagcaaagataacttttttccatttgtgcttttcatttcattaagataaaagtggtttgagtctctttttcaatgggttgataaaggaagggggctatccattgtccagcaccagaaggaggtcagctgtctgacttggtggcagtattgagaatttgctaacatggcaagcaattcgaaagtttcccaggcaaagatgcatttcatttgttaattgatttttaaagactttatcatgaaaacaggattggagacactgcatacaataaacaaaaataacattcactgggcacaatgcccagagaaaccagctacacaaacacaacactaaaggaaaaagatggtcccgaagagaggccaaaatggttcaagatgcagagagctcaacagcaaggggctccagagaagcttcacaaacacaatcctgagccctggcagatgtcctgtcaaggcagctaaaccctcatcacagcacctgtgcacagattcctctggttagtaaacaaagttgctattcacatattctctatgctttgtaatgcaaaaaattaggttgaattatatcaaattgccttttttttttttttaactaggtcaaacagtcaaatatcaacaacttcatgcacttcaacccaacataaaataaggagtggaactcatctcacaatgtctctcatttttttgtcatcatgaagctctttttctgggcacctgtagagaggatgaggtaggacagtctcttgcctactggactgagccacatcgacagtatctgaggatctctgccccgcatcctcagtgtagccagcaatgtgccaggtccctgatgcatgcaattctacaaatgttagagaagggagagaaacaagggggcatcattctgccttccttgtgctccaattattcttccaactcttaatcccttttgcttttatcctcatggaacatggggtacttaatgtgaaacaactttaacgttcattttttccaatgtattaactttataatggctagatgagaacacaaatatagtccctccccagtttggatgggggtaagtaaaaattgtttttgaaaaatgaatattcagatgtatttttcaccattatagaaataagagttaatattgtgatgaaaagagctgaatacaacatgaatgtagaactctatcatatttcaagacagaaagaattttttctaggacttgagagtacttgaccgagtagagtgtagtttaatctcaatgttaaatagtctttaagaaaaggcagataatccataggttgtccggttgttaaaaatcaggattaagctcctggtcttagttaatagatgtgttaagtaaatgaatgtggctagttttatgctatctgccatataatatcaaatttatcaggtctttgaagaggtgccaacaaaacacctctaaatccagacagaattttagaacacactaataattaaacagataatgaaatttaaaaaatatattacttgagtgttactattttccaagaaacacagttgttactccattatttttaatagaatctatcctacaaagtttcccaggcaattctacgaaaagatattggaaaacagaaatagcatttttgacattcaagcatttctacaactttaatttcagaaggaaaaacctcaaagtaacaaatatatttttagggtactgaaagaaaatatagctttaaaaaaatgttaatctttactctcagtgaagagaatgactatgaaaactgaccagtgatttacttactcaaaaagcgacctgactttgggtttatgaatgtatattgaaaaaaaaaaaaaaaggtaaatctgccttcaagttacgacttaacaggagttcggtgagtccataattagcacctcccatggcgggttttctagaatcttaacacagaaaacctggaatgcacatcttatttaacaacctgaggagacagagagcttttcacaggcaaaaacacattatgaagttcattaattaaacagtgcgggtggagcagatggatgctacctacgcttgaatgacgctaaattgggacagaggtttgcagtccttaatgaagctccataaaatgaatgattacatagtgatcacaagtaaacaaacctgagagaagagctggattatagggcaacaagtcctgcaacatggtaacaagaagaccaacatgcatggaagcacctagtacacagagaggctttgacatcattcaatcccagaccatccccagggttgaggaaagctgtgtgagtctacaaagagttaaacatgaaatgacagtcggtggggcaataatataaaaatgcctggccatggaaatgaagggagcagaaacctttttgtcacataaaatccattattgagaataagacactcaagtttccttttatcttcacagaaaaacagatgcaaaatgtcaggtacttgggctttttaaactaaaaggcttagcaaaagcagctagccagctaatgtgggcattaagattatttttcaatcatactttcccctgtcactaattaattcttcactttttcagctattgttaagcccttaacttttttttttcccccggacctaattagcttgtgatgcacatgaacttgcatgtctgctccaaagatatcttttgaactcatggggtagaatagaaatcattttgatattaaaaatttcctataaatatatgctgttgtctggaacttattaggttagaatgacctattatgtcttccaacttatacaaaatataatttcattaacagtaattgacaactttagaacaagaatggcccgaagacatgtggtagctacaccttacagcaagcattagaggtcagcagtagtcaatggggatgccctgctctgctgccagagccatgactgtggattctctgtatgccttcagatgatactcttattttcatcctcgcttcctgggctttgattttctctttctcattatacatggcctttatgtaagctctttcaaatctattttagagagaggtagaatataaatggattccacatatacaaataaatatcttgctagcaaaaagacagaaaaatcactgtgatggaactgcgtcctcaactatttctcaaggcaaaagcacactaactaacatcaattagatgcttattttgggatggactctaagtgggatatgccagtaagaatatttaaacttaatattttcactgctttttaatttggaagctacatgtatttaggtgtaagagatgtacacatggtatcaaaacgggaatactttccatcctaacttaacgataattttgttttcatatttattccatacaatcaaggtttaaaaggctaggattcacttggtaacaataatgagagaacaagctaaaactaattggaattgcttcactttctgaaagctatatcattttgatggtctcctattcttaggtcaaaagtgtgcacaaatgagaaacagcaggcggccatagagtcaggttggtctgggctctcatcccagccctgccctggctgtgggccccaggccaagacccagcttcctcgagcttcactctccccatctgtgggttaacacagtcccattctgcagggttgtcgccaagagtgagaataatggtccaacagtccttctgggtgcctgtgatcagcctgcgcttttgcacatcgtgcactgatgttccaaactgccttttggagctgagtttactctctggtccattggctgatgagaaagcattttatcagttacatgcagacactaactactgaccaagagttcaggctcagcagtgtctccacttctgtccttaggtaattatttgaatactccagtgaattttgccctcatttcataaaaatgagtggtaataggataaaataaaagtactagtaggagcaacaacaaacatagctctcaaactcaaggcagtgaaagcaaaactagaaatcctcacatatgccaaacgtggagaattttaagtgcctaataaatttttaggcacaccaaatacacaccagcttatttccaatggcaaagagcaaaattagagagcatgcttgaaaaatggcatcaaaactggaatatagaaagtgaggcccacttagaaattttatatatttttgtttcattttcagagaatagaatgccctttataagttagatgtgcatttgaattcctatctgtagatcagaaagcaaaaacttcagacttaaacatgaaaccaaaatgaaacatcaattctgagtgtctagcctgctccccaaaagacatcttttgggcttccaaaaagtaatctatttttaaaaaaatctatattaccctcttaggttgaagttcctttataaattcattcatttgccaaattctgattgcaaaagtgctcatgtgccagactggctacaaaacacttactgatccataattagaaactgcctaatcatttcatggttgcaattcctgactctgaaatgtttaaataaaatgttcagtaaaaggttatttataaaagaaccaatattttgatcactacttcaaagggaggcctgattgtgtaaatgcaaataactgccttattttagtacttaaggtctcagattgaatgtagctatctattagcacaactgatccaaagtttaggagggacattcttttagaagatcccatgtatttattttctagtttgaaaaatggacattttaatataaatttataatctaaatttctgttgccagaatttggttaagtgggccttatttagtatactagaagagactatgcaaaatcatattccacaaaagaatcaacattctcttatagctttaaaatactataatgtgagcttgaaatgctccacacctgaattgataagagcattaggcagtagtttctatgaagcttttaaaagagaaagttaacttctactaaacaattacaagtgttcaactaatacagtgtcttctgaccgattttctaataacagcttttaaaataaatctaccaaactgttttgactcttccaatgtaaaaaagaaattgaaagttaaagcttaaaaattccccatatagagaggaaataaacttaaaatagaaatttaaaataacttcaatccaaagtaaagcaaatcgtttcatacactttcagtaagtataacaaattttatatagtgacccaaaagtcaccattgtagagctttgcaactcaagacgttttagctggaggggttaaaagtgtgggtgtggaagtcagcttttgtttgaaaaattagcaatgctatgagtcatcgtgcattagctgcagaagagttttgcatcttgtacgaatccagacaccatatgccatgcgaaggcctattactttattcggtgccaccgctgacaggcagccacgtgggtatccccagcggaagggctgtctcctcccggcggcgaggacaggaacccagtgagctgaacacatccgacattgtacggagcagcaggaacagctggtaagctagcaagcggcaacggcccagcgaggagcgtggatgctaatgagcctggcgacaatgccggccttcagaggggtaagtgcaatgtcggccggcatgttcccacaacagcctcaagagtagaatctgctcgttcatgccttcagtctcattaaagcatgatactggtatttgtggcttatcaaaatcagctgtaaatcacaagttataaatccgaccaacagatccaacatgatttaaaatgttgcactgaaatgcaagtaaaattccacaggcatctttgggtcctgatggagaggtgttgaccaggcactggggtggtggggagccgtgagttgatggcacaggtggagcagctgctgctggttcaggtcctggttaccattcacaaaactgtgtggcctcaggcaagttatttaacttttctgggcttctgttccctcaactatattttttaaacataaaaaagtttgtgacataatagattgtgttaagacattgcattgcgtttgcataatacattaaaataggatcataattgtgccttcctgataggattgcttaataactgaataaaatatgtgaggttcttagtgcctgggacagagcaaagaatggtgcagctaagtaaacagatgtctctccaggtgacccaagaggacagctccaagcagcttcacctcctggtcttgttcttctcacacaagacaagacagtagcacatctccttatgagtgaggggtctatggcatgagatgggggaaggtgtctggcagacacagtgagatgagacagcgataagaaggggagggagtgatgtgtgcacatctgggtgctgtggaccccaatctgattactgcggggggtgggtttgggctcctagcagcatctgaagctccaagatcaccaagtttcttgatggttccaggtttaccaaaggctcttttccgctgaaagtcgtttactttttctgaatgctcctttcttccatcaagtccctgtgacgcctattcaccctccaattgccaggtcacaggccctctgtgggacgccttgaggctctgggctgcactctgcatcacagccatgaggaaactgtgcactgctctcttccctaatgtgctctgtattcaacaaagagcccctccagggtgggcaccgggccttccatttgtgcacccacagcaacagcacagtgcctggcatacaggaaatggccgatgggtattttgttgaatgaatgagtacactaacgaaaaaaatgcttttggacttttcagaattggtgtctaggaatatgaatgagattatcagattatcagaatcagttgattattttttgtcaagatttttttaagccctaagtaaaagacattttactgaatgatcatctccagcaagaaatgcaccttgcacctctatatcgtagggcaggatgtgtgtaaatatgagagagaactacctggttcttggagaaaaacttgtttctcagaagttttcctgtgagctaagctcaacttaaggggttctccgaaggtgttatctgtactctgtgaaaaatggaaaggatgcagtggcctgtgaggtgcagattagtgaaagtggccttaaaggtgagatgatcagcatagagtttaaaaggccacagagctcgaaacaaagattacatcccaggagagacctttgtgtaaaatacagtgtgtcattcactaatgaatttgagcatgtctgaatttggaaaccagtcctctctgaccggcaggcagctgctgaggctctcgcacacagcaggcatgacactcgtggctctattggccactgctgcctgctccttataggaccagcacacaacagtggccagaaaccctggttcaaacttgtctcccacatatttgctttcttcagatcagcccttaactttacgttgtatcctgaaatccacagataaaatcaagataactagatatgggaatggaatgaggattggaagccaggtaaagaactgaagaggcttttcctgactccccactctgccttccaaggatgccacaggggtagttccaaagctaatccctaggggaagctcctttggcctcagtggtccagggaaagacagatcttcactctccagcctctcacttggtcacagccattcaaagacggtagtgacatccaatgttcattgtcttctaatgatgttttgtgggaaagtacatgctagagtaagaatgctcttcagttactggcatttcaaatatatatatatttttaaagttttaatgttttaaaaatacccagactagaaataattacagcacaaagcccaggtctgtagtgacgcagtgatggtctggagcagcaccagggagggctggtacaaagtctgagaagggaatgaatatctgtctgtaattcacacatgcatacacaaacacaaacacatgtccatttccctgaatcaagtttcagaggaatggtgatccatgacggagattataaaaagtacacattacaaacagaatgtgtccctaggaagggtgttacgaatctaagccccggagctgctgcctccacagtcccgtgtaatgccacctaagtgctctgcctcgcatgacttgctgcaggctgccacggattagagctatcgatcgctgcctgcagaagggtctcgctgtgcgaaaggaaggtgagcgctagagacagacagctcaagtatcgatctgctctggcagaaggccgtggttccagatgcagagtggcactccttcacatcacccatgagttactataacgtgcacggaaacactaaagagctgggggatcgggccaaaggctggaatgtcatcaccacctcctcgcctgtcagctggtcacgagatccaaagatgccatgtgaaatctctggctgtttaaaaaacacaggcaacaaaagcctaggacgggcattcctatggtcttccaaggcagaacggacaaaccactgccacagaggactgccaagggtcatgttaagaagtggtcagagaatgtggatacatctttaagaatgttcctccagcggctgagaggttcaccagagccatcaggccggctcttactataaaaagacacaatccttttccccactaaaagctgatgccttcccctacttaaagcaaaacattaaaaaaattggtccaaacggacattctccttaaagaaatctcaatgatacaatttatatggttttcaaaagattttgggggagacaacttccaaggcacaaagacataaactcatctaaaaagtcaaatacaattatgaggtacatcaaaactcatgatttttgaaagcaatataaaattaggattcatgagaccaagttaaagtgaaaataaggagctcaaggaaatcaagtgtaacaggaacaaaatgcacgctttcaacacttgcttctgtggacacaggagcagagtgaactctattgctttcatgacttaactctctggatttagaagtcattatttaaatcagttatcttttcagtatccatattaagtcatttcctcccatgcacattgtaaagacatcctgtggtgtaattacataaatggcactagagtctactttcccctaattagaaattccttaaaatgtttgcatttctgattttaatccaactaacatctactgacttcttatgatgttagatgccggagactgaaagatgaataacacatagctttacctttaaggagcttgctgaccagtggaggggcagatgcctcatagtgagcccctcacccagtgtggtcagtgctacaccagctatggaagacagagagaaatgtccgttggcctgtggccctccttggacaggcaggctgctgcttatctcacaacaggctcactctcctcccttgaatctaggctggccttgtgacctgctgtggccaaatagttctgagacttccaaagtgctattgtgaagaagctggcacctccacctggatctctggagcctgtagcagccatgtcagaagcctgactgctgcgagaagacccaaactagccaagtggaggggctgctgagccaggtatgcctggccagccccaagctgttccagctatgccaatgcaggtgccagatgtaagagaccctgggtaagaaccatccagctgagcccagtcaacccacagaaccatagaagagcctccctccaccattttgcctttaaacatttctgcaaaaatctttataaagttcctttttttttttaagtgacagtgtctgcaggctattcaccggcacaatcatattgcactacagcctaaactcctggactcaagtgatcctcccacctcctgaggagctggaacttgcaacaccatgtccagctcttgcaaaaatcatgatgcttaattttgcaagtttgcagactctcatgtgagaagacaatgttaggacttctattaatatttatctttttatctccaatgatgaactcaattaagctttactgaaatttaacacgtgcctgacacttgcacccttcttgctaggtcatctatcagactgtcctaggtcaggttcaatgtatgagctgtactaagaaagagaaggagagggagcgaggggctggcagtagagccctcatttactttcagcacagggagaggtaccatggtttacatgagcctccaaactgaagtgttgaactttattatcctataaatcgtattatctttacaattcactgttctgaggcagagcatgaacatggaaatcttttgtcgcacacacgagtttgccatttatctcacaggaaagatcttataaaagctgaaatttgaatataaagatgagttgctcatttttcttttttatggaaagacaaatgtcctaaatttggtgaccttttctgtgatgacaaggagctgaattcgttcattcggcgtgtactcactgaaaaaatatttactctgcagcaggtgctgaggctacatccagggttggtattcacctggaaaacacccgcatggctggcgtcctggtcagtgccaaactggtgtccttatgtacccactgttaaatatttccactctcacccttggaggcaccagtgaacaaagcagacagaaatctctgccctcacgcagggggcacggtgtgagtaaaatcagtgaattacatagtaactgagagggtgataaaggctgtgggaacacacagcatgggcagcccaggcagtgctgggaggtgtgggtgcacatgtgtgcggggctctcgcatagggagacagtgaagaggggccaagggaacatgccacgtgggcatctggggagcagtagaggcagggggcatggagggcacaggcctcccctgaaggcctggatgctgagggaggcagggcccctggtgagggtgagctggcagtgacgtggctgactcacactttagtcgctggccctggctgatgctccgaggagactggggaggaggccacggtcagcaatgcgcccttagccattcctttaggaagaaagatactgctcccacaaaagaaaaggagagcgctgacactgagtgagagagtaactgctatttgaaagaaacatgctgtaaagagaaagccttcaattgagatgttggaaaatgttgccttcagcatgggaatttattgtcgaagatggtttctgttttcagaaagcactcatatctctactatcaaaacactcataaacagaattttatttgtttctaaacttccaaataagagctgagtacattttgaatctgtttgtccaaaaaaaatacattttttatacatataatatatgttatatataatatatatgtattttttatattacatataatacatatgtattttatataatatataatatatatgtattttatatatattatatataatatatatgtattttatatatattatatataatatatatgtattttatatatattatatatataatatatataccaatacaataagaaatatatgagctgtactaagctgtactaagaaagagaaggagagggagcaaggggctggcagtagagccctcattcaatatatatatatatagacctatatatatatacacacacacacctatatatatatatacacacacctatatatatatacatacacacctatatatatatagacctatatatatatagacctatatatatatagacctatatatatatagacctatatatatatatagacctatatatatatagacctatatatatatatatatatacacacacacaaataaataaaatatatatataccaatacaacaactgatctcacatcaaggaagatggaaatttccttccaaatgtcaacaggaaccttcatagaactggtggctaagaatgtaaactgagcacgaacctgtgatttaggaggtcaagacaacaatctgctccagctggtctatgtcctctttgcaaagttttgtttccggctatgaaaccaagttatcaaaatacactgagcttagatggaccccttggaatcactgaatcacagaactattaaactaagattataaaaataaagcagcacattttaattccactgcactcactaaagcactactgatatcctaataaaagcaaaacaattttacactattgaatataaaatacttcagattactatttcctctttattgcatcctttaaaaattctcagtattgactatactttatgtcataatgtactagtaaagcagaacttgtacatactttaaaataaatcagtatatgcactactgaatggcatgcttaagaggtttttttgctttttttttttttttaggtctttgggtggggtatgtaataagaaaaagcctgcaggcttctgaggtaggtagtgggttggaggcaggtgtcctcacccactaaagtgaggactgcgacagtccggcctctgtgccctcctctggaatggaatggggagtggcgaccatacagcctcaagagcatgctgttcaccaagacccttgcgccctgaaaaaatgccttagcaccctggaatgggccatggacaccaatataataaattataatcagcgtatgaatatctttttgtaaaacaaacaaattaacaaagttatgacatttcccacctatcaagttatagatgacacacacgtgaagagataactaatgagaggtacacaaaaacgtgaattatttgaagcagcagctagaaataatcttttcccttcgagctcccatgacccactgattctctctcttgtatcttgtgttgcagtgactcaacaaatactcactgggcactgaccacatgcctctcccagagcataggctgcatcctaccctatgtcacagttataacccatcctggctgtgaagccccctgaggccactcacctctgcctgccctctacagtgcttgccacggctataccgatgttggttgcaggaagaacacagaagcatggccaccctgatttaccatggcacatgtggcagggtctgggccctgagatgttcttctagttggggctgggagaacgagcgaggggccaggccctcctctacactgctgcatccatcagctcaaccgttcattcattcttcagtctcatatttatatatacttcattccatacatccttacaataatctgtcttggagggattattttcctcattttagagtaaggaaactgacagaggtaaagtattcaaagccaaaaactaagttattatttaatttaaactaacatcaaaacccaaggtctgaggtcagctatgacatgttacctgctaagctgggcatgacaataaacaagatacactttaaaatttatctggcacttgtagtaaaattgctgccatgaaggaaagagaatatccccaaactcttctgtgcaagaactcttctcactgagaaccaagacttgaccataagggtccagtgttatggtgtcagttacacggcccaacatgagacgtagaaaaaggttttacattgctttatgtttcccctaaattaaaaaacaaacaaaacatgtttactatcctactgagttattgtcaggggcattttagttaaacaattggtctacataacaaacccactgaggaaactggcggttcagctcgtgcacacatatgggcataccagctctgacagcacacagcagctctggaactccaaagcatgactgacctgctaccttattgaatcttgatgacctaaaaaagtgatcactgggcaaattaatccagagagaaggagtgtggaatcagagtctggaaatttatgtcagagaaagccaatataagttaaaaggaaagcgcatctcatcccaatctgagctgaaacccacacttaggctaaaattctacaaaaaatggggtggtttatgtgaagtgctttccttagtcaaattttctgcaaaaattatatgcatttgacaaaattatagagcataagtacaaaaccaatctgtttctttttattcaaataatttagatgttgttttctgatgtagtcttctgatgtgcatatgtcattataagcaaagaatgtttatcctgttaaagaggcatacattctatttttctaaatcaatgagtaaacggtatttctgagacattctaaagaggctcttctttttataggggttaaaaattatatgaaaatactccttaaatttaaaactaacttacatttttactgatattcttattaaaattggtttctttggagtataaattcaatttaactgagttcaatttttttaatttcaaaagtgggaagaaaacacacatcacagctaagccgaactctcagcaggcaaatgtaatgtgatgacagttgccatcttctgggagaaagctatggctcttggatgttaaaggcagagcatgatagtaagcagcagcagctctctccatcagctctacgccttctttaaattccactgaggatggcagtttggatggagaccccaaaatctattctgtccatctgttttattattcttagaacaactgtcaaaagttgcccagggatcaagttgcaaacatactaatttgcctttgaaaagtaggccctgggggaattctggaactctgcttataaattcagaatcccatcagccagcaagcctgccctaccctttgtggaggtatgagactttgcacttccaggcatacatctgcctcaaagccgggatgcactgatatactcacatcccacttcataggcaaatgaagggagaaccaaagggacttggcatcttaagggctggcttgttccatgacaagcagaccctgaggtttcaggaggcagccccttcattggtgttggattaaggaccaaagctttgtgctggagagtttaaacaagtggacaaggcagagggacaacatattctgtgctcttttatatcctaggaccaaagaggaagattgaagaccgaaataaagcattagaaaaaataagctaaggaaagataaaaatcataagccactaaacattgtagcatttcatttttgtgattctgatgaaaagagttacaaaaagaccatctgaacatacagaatatcaggtgtaggttttctaaggaataatgagaaatcacccaagagttggctatttaaaatattgtggcattttggggacatgctatcctactagaaacgaaagcagctgtgcacttctcaagttgaatgtgttaaagccatgtgcaaaacacaatgtaaacattaaagtgcatctggactccctagggctggcacacgggacacctgatcatcacggaggagaaaagggagtgggcaccagcacagaaccctgcagtatccttccttcctccaccctggccccaatggtctctatctaaggctttcaaagcacagggcctcagaaatgtatctgaagcacaaaattcaaagtaccccttttagagtgtggtaaaattcctcagtagtaaaacagaaaggacaccctttcaaggctaacatgatggcatttgggtcgtactcacccctagattaccaaaaaagtattctgctttcattaaaaaatttacttgagtgtgttgcaaattactccagcacggaaacctgctgggagctcactgtatacgccagggcagactctgcacagaagggaccaccatttggacttgcctgctttgtccttctttggctttgcagcgtctcttattctaataaggtatgtattatcctttttagagatttgaataacagaaagtctcactttcaaaatattgcttataatcccagagtccactaaacgttctgtggatgctgtttatggcattctgttcctttcaacatgggactgataattagtaaactgaaatttgattaatgttggattaagaggttctgatgtctcactgcaatgtgttatttcagtctgtgggcaccagaagagattgtctttaggaaacttgttcccttccctttccagaataggaggatgggcttaaaaccctgactttttttttttttgttaaagaattcagtttgtagtcaacagtttataatgtaggattcagttttttttttttctgtctcactgttttttgtttgttttctcactttgaagctggggccaatgaattaactatttaagagagaacaaaataaacctgaaataaaagtcttcttccaaaaatgccaagggtgggccttcctggttgagtaagtgatttggcatggataaacggttcagacagctttagatctcaccaggctttgtacccgcttttgataatattaagaactcctctgaaaacaaaggagccgtgtgatataagtatcaaagcctatgaaaatgactagataatatttaaagggaaaattaataaatttagactactttgtgcttttttaaattatgatttttattaggattcattaggattataaaaagtcttgtaatggccagacttttttctatgcttcatggccagaagattccatgtctcttccttgcctgtgttttaaaatttataatcttgtttgcctactgctgaaaagtgtggaagaatcaggaataatggctccctttgaagctctgtcattcccaaagtaaccatctgaatgctaaagaaatattgtcatttatggaatgaccttttgctctttgaatactcagacattaataaatgttaaatgcttagcaatcctagcagcactatgaaaaaggtaagttgggtcagcaaataccctcttgcatgcttttgatatgatgaccatttccacttttctaacagctttctaatagcaaaaatgtatttgggaacaacagtggaatttgtgtcatcatgaccaaatgattacggtgcaaacccgagattcttctggggcccagcaggcttctggtccctatggaaacgaaacctcagatattgtcctccactcagctggaggacgaagcgccaggaggcttttgtgcttggtgagatttcttccacaaccttcccgcaacagaccctagtgcttcctccagactcttttctaattgagatgcaaattaatctctctggctgattacacttcccttaaagctactgacaaatgcagctgtaaccagagtttgcggactttccaacaagtgacttcagctgtcagtatttgcatgctcagccaaggcccgcccgctcccagtctcagagccatggagagcttcctttaggcattacaagcctgttttatttatgtgtatacaatttacatacaattaagagttaaaaacaaaaaaccacaactaggtccctaggatttataaatggactctgacaatgaaattaggccttttcagacacttctttctgacccaggtctagagagtcactcctttctcaggaggccaaggctttgatggtacatttccctcccacttccttcttgtctgcaaggtttctgactttaacaatgtttgaattcaatctctctttcaaaaaccaactaaataaactaatggctctaagaaaatgggatcacttcctttatagtgatctcaataagattctgttaatttaaaatcaaatatgaagttaccattctaattgccaagatttccatataaatgtgcttcaacaacttaggggtgataatgttagaatgattatttagagcacaataaaaatatgcacaaaacacccagtaagaagaaaaaaacacaaaaaccaatttttcggtaaaaattatttgcttcctcttgaatcctatctatttttgagttcctactatgtgtcaggtgctattttaagtgttcaggatccagctgtaaactaaacattcaaaaatggaaaagagagagttaatgtatatttatatacatacatatgcatacatattctattcctaaggctatatttcaccttaggcaattaaggccttcaattttgaaaaagtatcattttataaaatatgatttacttttggcttctgttttccaaaatgtttcttaccaaattactctccagcttcttccctccccccgcaggccttcacacacacacacacacacacacacacacacacacacacacacacacactctctcatactaggggacagcagcagaatggacacaaggcccccactgggaaagccagcactgtggcaagagtgccacatctgagacagaggatagaggaggttcaggctggcaaggagtgagtcagagcagagacgactatgggagggtgaggggtccttggcacaggagggcctcaagggcagtgtgaagggtggggtatagcagagtggctgagaggagactcccaggttaggggtcatcccagtgggaagcagcacgctccctatgatggttggtagtgagatgcagtgacccactggggatggagctgagagaggggggaaagagagaaagaaggaagaatgaggctgttcctgatattcccctagggggagcatcagcctggtttctccacaggctgtgaggttgagaataacttctgaagggatggtcttttttctaacagtgagatgtcactctatagcaaaaatagcagagtgtaccaccttctctcgagatttctcctgcaccttcgcacttctcacgggcctcatttccatgcaccaagagtggagggcagctcctaccccagggaaccagcctttcacacagaagaggaccttctgcaaggcactgaatgaacagcattctaccagcctttattttaatacccacaatggtaaaaaagtaaatatttcctgaggcctaactccacagttaggtggttccatttttacaacagaggtttgaaactccagtatctgcaagggccaggctgataatatacaacaattgcaggtaacgtttgctgggctttcaccaaggaacaggcactgttttacctgcttggcccattagccctctcaccaactcagagagaccaaatggtgggtgccatggtggtggtgcctggcaccaggcctcagcactggggagacaccaggagggactgtggtgaccgtgacagcacatattctgtggagagactgctgtcagtagaaggaaggccccatagggtcagatattctgattcttcaggagaagtcaaaagtctagattttttaaaaatgcaaactctcccaatttttcagcatggctgacaaactcaatttttagtttagttttttggtaatgtgaggaggacaactgcagttaaaacaaagcccatctgtgggctggatttggtgtgctggcagctggtctgcccactctggtttttgaatgtttgacttgacactgagataaagctgcttcctggttgcttctattcactggtcacagttctgcagactgccatcctcttttaatacctctcagactcctgaaacaattacttcttggttttaatggctctccatttggttacaatttctctggattggctctgggttggtcgaggtcccttttaaaatgtggccccagggctgcacaccacctttggatgctccctgaggctgcaggagcacaggccgtagttcctgtgactggacctcatgtttcctatgcagaggtctcaagagaatgctggtgtggctggctgttgcatcactctcatctctcatctccaatctgtggccaaccgaaatcctcagacattgttcacaatgactgctatgaaaccacatcactctcaccctgtactcaggcagctgattatccaaagcccagtacataacgttacattttgccctcttaaacctcatcttgctggcttgggcctggaagtctctcatctgttgagataatcctaatgtgtgactttgcatcgtgtcaaattagttaaccctctcagctttctgacaaatggtggcttgataaacatgttttagacctttatgaaagttactgaaaaaactgctgactggaagacgggttaacagcaaagctgtggcatcgaaaccatacaagacacacaaagcttcttgctgactggtgcccatgaattaatgtattttagatttggtcacagtgaaatcacccaactctcaggggcccatatttctctcttatacctgccagatgatagtattttattttatattttaccaaaatcaagatgtatatgcttcctctaatctccgaaaatagtaatcttataaaacacacagtaagtgtgttccggatactttgtcaacatattcatttctgaaggctcacaggctatttagtaacctagtctaataattttacaaaggatccatgcaacattccaaaattcatcctttaatcctttttgaaaacaaaatattttcctgtttccaattttgggtacatcctttattctacatgatttctaaaaaaatatttcttgtggttctgagattatttgttctacagccagatacacgtggccctgcagtctggagcttaggtgcaagagccattgattgattgattgattgattgattgattgtattcttagcgacttgagttttaatttatccacttaggcacttctctgtcccttcccatttgaaggagatgtgatagagaagacggaagtcattcagatactggctaacagtgcccacctgctaatttacagagtcaagagctcctctttgaatcttgatgtgagtattttaactatgaacgcatcagagaacgcaaccttgtgcagctatattggttgctcctccaggcctcccctttttctttctcagaggaataattttaagtttttaataaaaatccccttattaaaaatctctaattcctcattcccttttacagtctcagcccacccaggggaatatgctatttcttcctctgaactcttctttttgtaaggtgcttcccaagtgtctagggtacaggtctaccaacatttttttcccattcttcttcttcttttttccctcccattcttatacaaactctactgaaagctcattactttttgcaacgtccaacgtcaaaaatccattccttcaaattactaagaaatggatccaaaacaaaaatagtagtgcctcttgtttgcatctctcagaagagagatgagattgtctgccagccaggaatttatcaaacacatgtcacctttggttgaatgtatgtcagagctgatatcaagtagtagaaatccccactacagctatattttgctttgggcctgtttagaaatttggattagaaaagcatggccatccctcccatctgggggtataactccattctggctgccgctcttcaatgcagcccctctccccatgcatttttcattcacaggcacgtgttgacctcactcaggagtgtttctttgtggtgctgctactatctgatatgttttaacatcttaccttgcagtaattcagttctaggtcctcttatacccaatcctccaggtgaagacttgagtctgctagaaccagtcatgaataaaaccacccagtaggatgtctctttcttggccagtctgctgaaactaacccttcatttctctctttcctgcttttctgtgaaaccattctctcctattcccgtctttctttatctctgccccctcctttcaagccatttcttcaaatggcccagagagttctgtctgcgattctgttctcataccaccaagagaccaccgttctattcttctcattctctccacacccccacaaatctagcaggtcccacactgacttagtccacctcctttacctagatatccaatccatcatccctgccactgccttcgacgagacccctgctctctctcagaaccccgtccatggccccttaaatgtttccatcacctccatcctgtgtgtgtgtgtgtgtgtgtttgtgtgtgtgtgtgtgtgtgtgtgtgtattctatactctgccatatggaagcatctgtcattctcaaatgtgataatatgatgtgctctttcaaagcctggtccatgaacaaacattggcccctcatttggagtatcttcacatttctattcctagcggcaacgactgtgcctggcacatggcaggggcactgtaaatgttgacgaatgctaactggtgctgcccggcaaaatagaacacatggtaccatttgacttattttctgaaatgtatggagatgaatggaaaaaataaagatctgtccaggaaaaagaaccaaagatcccactgaacaagaaagaaacaaggttgttatagctttagggagaggagtcatttttgaagatgtgaaaattcgtagcagaatttagcaatgagattccaaagtcatgggtctaagaggggacactctggtactatcaaacacatatgttaactgaaaatgaaagtacatttcacttgtgaaagaatgagatacaaaattattttttcttaggcagcccagttctctccatcaaatgctgatagttacagcgagtagagatggtgaatgccattgagactattgttctattgaagtggacgtttattttaaaaagccaccatctgtttgattcagggtgaactcctcctaacgggcacactgcatattgtgtggcaaccttttccctgaaacaagttatttgatgagaagaatgaaaaccttggctcaaatggttgtggaaacgtctatcagttgaccacggtttgattttggaatctttagtcggcttgggaatggtaaacataacatgtggcaagcttcccatttacaaccctctaggcacaggaataggctctttgattgcccatgagggatagaaaaagcagatggcaggtgagttggccctcatcactcagaaaagcagtggccacaagatgaaggctccacttgacaaatttgatttagcctgcagaggacatcacaggagaacccaggagggacaaaggggctgcgatgaaccgttcctgagggtgctttccaaagatacccctactgtgcttacatttttttttaatcatataagacaatggtatttttcagtcttctatgtgcctttgctgcagagttccaactgttaactcagccaagggctcccaaataagaactgctttgatattgattctaactgcatttacttctcaaaaagacccccaaagggaaaatttgctccagcaatgcccccatccttagcttaattagaaatgtttcattttcttaaacatagcgaacaaaattaatatgtaactgcccacatttccacttctagttaaatattataaaaactaaagcccaactgacacgattttaaggcagtaagtatcagtcattagctggggagaggacagagagataagaaaaactactccaaagtaattccactggctcgtttctttagttgtcatcttagcacagcatccagagtaaactcccacagctgcctgatgtcaggtgcaataagtggggagggagtgtagggcccatcatgcccagcatgtgtaatctccccaagggctgaggagatcagcagtaccttgggcacacctagaaccggggctggctatataacctgagggtcccagtgcaaaatgaaaatatagggctcctttttcaaaaaataggaaaaaatgcctttaaaggtcctaaaatataaaggttttcctatttgtctgcaatctctcaacttgtcatggtattttttatttgctatttaatgttattctaacattactgttttccattttatttgttttctcttattatattccttatttctgtcctgaatattagcccttctgcagacagaaattaaaagaatagagtagttaaatgattgcaaagttttccccactaactccatctctataaaaaattaggtataacagttgatttcttgttttaaacaatttatttgaataataccaattaaattttctccaggtacaagacaaaaaaaagtttaaaatattgataatgatcaacataatagtttttaaaatatttttcctaatttctgtactacattgttgtttgagatgtcaagttagctattttgtgagttagagtacatttactaacacacaatagcatcagtagccctagctggtatccacattagtcctgatgtgtcactgcttgaaaagttttcaaagtgattctgaatagtatcctttgaacttttaaaaataccattttccctaaacctgatcattccaattgtatcacattaattcttatttgagaaagcagtgttaaacaaaataacaaagcaagtattttataatgagaagttcagtaagtagagaaggtgacatgacaaaagtcacaatggaattaatataaaatggaattttctcatttgtaaaataagattttttttttttttttttttttgctgccttggtccaacatacttgactgatgcgtgcccagctcgtcctagttgacatgcaaactgacaaactaatcgctgaatagttctttctcatttctgccaagaggctctttttaatagtatgtgaaataaaaactccatgctgaaggccaaattgacaccagccacaagattacgtctacagtgttgtggaaatcactgcaaagaatgccatctccaaaacactcaccaccagcctggacaaagcacgagagagtacactgaagggaataatcctgccctggcccccaggggagggaccagatgggacctaatagctcttttctactactcatttctatgataattttaagttgccacatggcatatgtatttttttttaatctaaaggcagaatatcagtcaatgaagtgaccaggattttaatgaaaggtattttttcatgaaccgtatctattcacatgggatagttttcatctacccccaactctcacttgctatagcaacacatcacttactatcaggttgggagaagtatatatagaggtcaaacacaatatgtttcaaattattatcaataccaattagaaacaaagagattctaagttttattaggaggtcactttttttgcatcaattttataaggtcacccatcttaatctctttttcttataacttgagatcatgcttgaatttaaggactacagcaggccaattaatgtttgaggaaaaaattttaggagtgaaatttattctgtttttggaaacaaaatcaggaactagagaaaatatcaatgatttgggaaaattacaaaagaatttctagctattcctattgataagtccaaatgcaacttaattcaggacatctttccctctaccctcaaccaaatgcaatttctatctcctctgatcttccagaaacctacttgcacttctcaggtggtacctgccacattctttgatttattagggtcatttcatttgctttggtttctggtaggcactctgaatgagcgatacgttttgctcagcatcccaccttatatacaatggactgccacaaataagagggatacaggatgagactgaacgtggggcaaaatacctaagaagatatgagcatctcataatggtcacagcttctcagacacaaacgtatgtgagtaaattatgaaagtaaactctaagtttaatgcagcataaaattattatatttaatataaattaacaaatgctatgaaaaaccactatgttatttttaacagaggttgaaaaaaattctcttccctcttcaattcagttttgaatacttacctcttatgaaaaactgccaggaatcttgattctgggatggttagtaagttacacatttaaagcaaaaagatacaagctctggtagagtgggatgaggcacttcacagccctgctggcgttgatgcacgtggcacatacaaggcttggcagcagcttcccactcactatggctccatcaaacagaggcccaaaaaatggaacctgttgatttgaaatggaaaaacaaattttaaaaactgataaaagtcaaatcaaagatatgagagtagctgactgatgtcagacctgcaatgagcacttaagctgtcacccacagagcagacgctgaccttaacaggacacaggtctagggctttcaaattgagtgaagcaggactgccccacaatgctcctttactagggattcttcagcaaaactttcaatgacaaaattttaccaggttcttcgttttttctcttctgttgtcatttacagaaatggtgttgctcttaagtgcctacatcatgtgaattatgcatgatacacagacatgcttcactgcacactatccttgcatctgtctgaaaccagttatggaactggtaatgttcctgccatgggtcctgatgtatattaactcttaaaggagatgatgatgatccctgtcaacaactacaaagtcctacacagtcctcattcttctcgaccttttccccctctgcttccaagatactgcattaccttcatttccttctacttttttttgagacagggtctccttctctcacccaaactggagtgtagtggcacaatcatagcccattgcagcctggaacttctgggctcaagcatcctcccacctcagtctcctgagtagctgggattacagttgcaccaccacacccagcttctgtttttaatagagactggcttttcttagctgaacccatttctgttatgtggaaaactcacaagtttctgtgcttgccttttttggatttatttcttctctctcctttttcccccattagaatttctttaattttattcagtaacatgcagattgtaagttccatgagatcacaattcttacatgagctccatgagatcatgtaactcttatattcattcacttattactcccctattcatgtattcagaaaatatttattatgtgttggacactgttctactcactgcagaaacaacagtgaatagtacaaaaatccctgaatttattgagcttggaatttattggagattttagagaataaacagtataaacatataaaatatatgacaggcaggaaaagtgctaaggtaaaaataaagcagggaagagcaatataactttatttttgggaggggtctccagttggctctaatggccagggtgggctttaagaagaggatgacatttcagtaaaggcctaaagaaagtgatgaatgaaccacaagctatgagaacatctaacggaagaacattccaggcagagtaacagcacaggccttgtggtgggagtagaattagtatgtttaagcaaccatggctggggccaagcgagaaaaaggaagaattaagagctaaagtcaagcaggtcacaaggggtgctttataggaagttttaagggttctggatttctgttctgagtaagatcaaatcctcctgaggatttagggaagcaggggatatgatctaaaatacattttaaaggtattgttttggcacctgtgttgacaaaactgcaaaggggaattatggagactagctggtgactactgaataaagcaagagatggtggtaatggcttggatcagaatggcagcagaagtggagaaaggtgacagatatattttgaaggtagagttgtcaggatttgttgaggatggttaatgaggtgggagagacagagaggtgtcaaggatgatgccacagtttctggcctggccattggaaggctggagctacgttttcctgaaatggagaagactgagagggagggtcaatagctcaacttcagacatgctaagttagagatgcctactgggtatccagtgatgatgtattgggcaggagtagctataccatgctagagtcaggggaaaggcctaggttgaagctgttcacttagagatgatgtttctagccatgagatcacataacatcaacaaaagatcaagaaaagagactcaatgactatatcctctggccttccaatgtttagagcttagagacatgagaaacaattagaaaagaaagagtggctggagatggagcaagaaaaccccttctgagtagcactgtacctgacacacaattggaaggcaaatacctgctaaatgagttacattcattaatattttaaataatttaaattaatgaatgtgggtctccatcctaggtctttaaacttttctcaaaaactatttatttgtaaagccccttttctgtggttggcattggtgaaggtgcttgggatacaataatgaaggagagactgtctctgcccataaagagctgacatggtaagaaaactatggactaatatctctcagcaatgatgcaaaaatcctttataatttttttgtaaattaaacccagcaagataaaaaaggacaatatatcttatcaagcagaattttccattggaactcaaggttcatttaacattcataaatccatcagtgcaatttatttttgcaatgtgcaaaaatccacattgacaaaatacagaataaaaaccatatgactttaacagacacagaacaagcattaaataaaatttaactctcactcataattagaaaaacaaaacagaacaaaaactctcagcaaaccaggaatagaagggaaatgcctcaatttaatgagagcttaaagggggaaaaaggtgtcataattaatgatgaaagattaagtattttctaaaagagatctgaaaaggcaaggatgtctatgttcacctcttctactcaacatttttgaagatcctagtcactacaataaagaaaattaagagaaagaaagaagaagggtaggggagaagaggggaacataaaggttagaaagaagtaaaactgtttttattcacagatatcatgattatgtatatgaaaagtccaaagaatttaactagaattagtgagtgaattttgataagcctcagaaaacaatatactcctcaaatcagttatatttctgaatgttagcaaccaacaattgggaaaagacatgtaaaaatgttgtttataactgcatcaaaacagaatgaatttgataaaagaatgtgcaagacatctatattgaaaactaccaaacagtgatgagataaattaaagacaagctaaataaatggaaagatgtacaatgttcatggactggaagtttcaatattgttaagatgtcaattctgctaacattaagctatagattcaacaaaacccaatcaaaattctggcaagcctttaaaaaatatacatgtaccgaatacttctaagttcataaggaaatgaaaagacataaattagtcaagatgataataagaagacttatattacctaatttcatggcacactataaaaatataataattaagaaatcattatagtggtaccaggataaacaaatatttcaataaaacacaatacagagtccaagaatagagccatacctacatggtaattgatttgcaataaaggcagcatatcagtttggtggaagaaaaaagcctgtttcaataaagacactggaacaactggagagccatatggaaaagtgaaccttgaccttcatctcatatcacacacaaaaattgagagggttatagactgaaatattaaagctaaaaccataaagcctccagaaaaaaaatatgacaaaattgccacgaccttaggataggcaaggattttttagggtacaaaaggcataaatcataaaataaataaataaataaataaataaataaataaataaataaataaaagaaaatacattggactatatagaaatttctaaaactctgcccatcacaaaaatgaaaaggcaagttatatatagtcaccaaacagaacatagccacaaggtccatccagaggagaacaaattaaaagtttgtgttatattcacccaacagaatattccacagtaacgaaaatgaacaaaccacaactacatgtaacatcatgaaaataatccaaatataatgacaagtgaaagaaacagacactaaaaagttcatactacataatttcattcctaaaagttcaaaaccaagtaaaatgaatcaataggcccaaaagtcagaatagtggccacttcttcattgtattagtgattgagatggggcacgagcaagaattaggaggctggcaacatcctctattttgatctggggtggtattacacaagtgtgttcactttgaaaacatccatcatgttgtatacttacaatttgtgtccttttcaatattaaatatatttccaaggaaacgttttccagaaaacagcaagaatacagaggatttgaacaagacaactaacaaactcatcataatggaaacataaaatactctacccaacaactgcagaaaacacattcatttcaagcatgtacagaatactttttaaaaagtgaccatatcctcagccaaggatccacaaatacagcctgcagggcctaattccaacctggcacctacttgtgtatggcctgcaagctaagaatgctttttactttgtaaacagttggaaaaaaattaaaagagtattttactatgtgaaaattatgagatctaaatttcagttcataaataaattttaatggaacacagccacacttatccacttacacattttctttttttggagacagagtctcactctgttgcttaggctagagtgcagtggctcaatcttggctcacagcaacctccgcctccccggttcaagcaattctagtgcctcagcctcccaagtagctcagactataggcctgtgccaccaagcccagctaatttttttgtacttttagtagagacggggtttcaccatgttggcctggctggtctcgacttcctggcctcaagtgatccatgcacctcagcctcccacagtgctgggataataggcatgagccactgtgcccggcccacttacacattttctatggctacttttgcacaataatgacacagttatttagttgtgacagacccaaggcctaaaatatttactatctggccctttacaaaaaatgtttgctggcctctcttctaggttataaagcaaatctcaataaatttctaggggtggaaattttacaatccatattctgtgcctaaaaagctattgacaacaaacaacaacaaaaggataattggcacaaacctctatgtttagaaattaagaaatacacttctaaataactcatgggtcaacaaaatattgaaatggaaatttagcaatatgttaagctaactgataaaataagactagtagatattataacttataccttatagcagtacttacagggaccgtgtagaatgaaatgctcatattagaaagaaataaagactgcaacataatgagataggcacccatctcaagaagtactgaaaaaccaaaagaatcaaacaaattcaaagaaagtagaaggaaagaactaataaagataaaagtcatcatttaaaaatagaaaacaaacatacaataaaaaggagaaccaagatcgacagttagttctttaaggaaccataaagaaaaaaaaaaaatcatgtcctttgcagcaacatggatgcagctggaggccattatcctaagcaaattaacataggaacagaaaaccaaataccgcatgttctcacttataagtgggagctaaacattgagtactcatggacataaagataacaacaaaaattgtataaaaagatggcaacaacagaaactgggaactaccagaagggggagggaggggagcaagggtcgaaaaattaactattgggtagttagtactaagctcagtacctgggtgacaggaccattcataccccaaacctcagcatcatgcaatatacccaggtaacaaacctgcacatgtactcctggaatctaaaataaaagttgaaaaaaaaaagttcgttctttgaaaaaagtctaatacaattgacaggtctttggcaaggtgaatcaagaaaaaaaaagcacaactaaataatattagaaacaaaaaggaatccaactatagatacttagaaaatatacgtagctttatgcctataaatttgaaagtttagatgaaatggccaaatgagaaaaaaaatacaatttagcaaacacagacacaagatgatatataaaagctataattctatgagctttaaagtagatgaatcatagtagaaaaaaacattctaacaaggaaaagccagctcagaagccttcactggcaaattctataaaatcttcgaataaccatattcaaaataataaaattcaaataaaatcttcgaaagaacaaataactattattttggagaaacttccatagtataggaaaacagaaaatatactcattttattaggctagtacaatcttaataccaaaatgaggggccaatctcacttatgaacatgcatacaaaaaccctaacaaaatatcagcaagccaattccataatgtgcaaaaataacaatatcatgaccaagtcgggtatatcccaagaatacaattttcagtaaaaatcagtctgtatacaaccacattaatagattgaatgagaaaagtcaggtaatcacctcaaaagacatttaaacaagtgtttaataaaatccaaaatccagttaaggaaaaaattcttagcaatcctggaatagaagggatcttccttaatctgttctagaatacctacagaattccagagcaaccactaaatggtgaaacattgagaacttgatgtgggagactgtgaaggagaaaagaaatgtccccctacatcacatctaccaacatttgcactggagatccttgccaatacagtaatgcaagacacaaatagaggactatgaattagaaaggaagaaaaactgtcatttttttagatggtataactgtactcacagaatctccaacataatctatggcaaatggtcagaattagtaagagtgtttatcaaagtcaatggatacagaatacattcaccaaaaatccaaatgcattcctctccaccagcaacaaatggttagaaaaggaaatattatttacaacagcataaaaatataaaatagatctaacaaggaaagtataaagaaagttacaaaactttattcagagatgttagtttaaataaatgaaatgatagatgtgttcttggactagaagactcaatattgttgtgactttccttcctagactgacctatggatttaatgcatggcatgtatgtatcttgactagctgattctaagacatttgtagaaatgaaattggctaaaaaaagccaaagaagaactgggtagggacttgccttacagcaagatatatcccaacctgtggtaagaaatacagtatgagtaaggcacacgggaccagtggagttacaggagggcctacccacacagcctcctgcctgtttgatgactgctgaaaatcattcaccaagctaagtgggatatattaccccatgagttggggatgctgacccataaggtatggtatgtccttttttcctatccctatgatgatagtctctgactttagttttagtacttaaggagtactttagtacttaagtacttcctagaagaagatacagtgttctcagtgggaagaggaaactgatggtcaggtattttaggctccacagaccactggacactgaggcagtaaaggaggctccaggatagacagggtgagtggtcctgccagggaaaacagtgctgctgctgtacaaagcggatgcggaagggttctcatggagcactcactcctgatcccatgctcaatggtaaatttaatggaagacaacatcaagtatcagtcctaatcagaaccttatagcagtatttcatcctgctgagcatgtatatttcacaaccacctaaagtttctgagtgactcataagtgccctctcctaacatgatgaccaaagcctggggattaataagattttccatgactgctgacaaactggatttccttaccacctgcagattaggagctgcttgtggagcccctatcatgtgttccttgactaaagaagtacagtgctcaggggaggcacacacctagaaggtgcagcccaaattaatttctttctcaggtttgggtccagatgaagacacttcatatccagggactcttcttggcaagatactgtgaaagcaaagagagccttttgcagcaaagtgataacgctgaagtccacgtggcaacactagccagcatgccagcacaaggaagtgcccagttgttggagcaaagacaaaaaagaatccttaggacacagaaaatgatctgaaatacccatttgatttgtggggatggggattaatctttcaaggatgcaatgcagacatcttgatggtccaaagcagggcaatgaacaactgaactctgttccaattcctcacagataacctccagcctccaggattggaatattgccatggatgggcctaccgagaggcaggccacattgaaaatgacaaatgaagaatgtgcgtggcttaacttacccagtttggtcagttattcattctgctaaaaaactgcaagtattgtgttcataacaatgatatggctgtgatttctgtgtccagatttttggcactgcctttatcatgcaagaagtgggtaacttaatacaaaggtctagaattcaaatttctccttgacttcacacatatacctataatgtgaacacaggatgtgtacacagaatataaaaagcatctgcatacaggtgtgaaaactgatacctctctactcttaaagagattcagtctactgggatttaggatgctggacttggtgccagaatcaagtactcttggataaattctttatgctcttatcaactacatacatatttggagcacaagggcagtgttgtctgccctgtgggcctcacagagtgactaaaaggttcaaatgccctaccaaccccgaaagcgtgttgcaaatagtactgtcctaatgagaggcaaggtaaaaaaaaaccaaacaattttgagatatatgtaaaaaccttaagagaaatgtaaggtatatttctgagaaacagaatttttattttcctacattcctatctctgtataatataaatacattctctaaaataccagaagatagcttttgggaaaaatgaatactcagaagactctaaaactttgtctgaaaattctaaagactacagtgaatctttctgtgtcaaaaggggcagagatttcatgtaccatctgtttatttgcatcatttgatcaaagttctgttaagggctgtgggggaatacagatatgaacaagtcgaggctctgaactgtaggtagtttgcagaagaggtaaaacaatgtattcaagaaggcaaaagggaaaaaaagctttagggtggacgcagataaaatattctgaagctacagagagttcttttctagctgagagaagccatggaagtcttcatgtaggaagtggtcatgacagtgggtgttggcagagattcacggtgggaagagcggagcactccagacaaatggtaaaaataggaatgaaaagatgaggtgggtctggctctcttttctagcgcagggttccccaaagtgcactttaagagatactaatttagctgagtgctagctggtttgtatgaatgctgtgcctacagttaatgattaaagtattacagataaataaacagaaagactgtggacagaacatggcaaaggactgcacagagctcctgagggattcctgagagcaaagtgaagtcagaggtagggccacaaaaggaagtgaggcaggcatagaagcctagactggatttgagaaggatggaaagctctggaataggtatgtacggaaatgcatacagataagagaaaaggctgaagaacaggtatgggaagccagatgatatgggacttgatgaaatgccctgcagaaattaccagcttgctctcaagactctgcactgctgtacttgcctactcctgctcatctacccacatcatgtcctggtcatccaaatgaaagcaacacagagcaccaggtaagtttcccatcttttacttaatggaaaggctgagctgaaggtacattcactgtgtgtgtcagtaggagataagatctggtgggtggtgagaattggaaaggctgcagatctgttgggtgttcctcacaagttaggtggccagaaaccaaaatggtaaagtcaggtaggaaagagtacatgtttttatacgtggagagaaataccactgcccatcaaagaatgatggaaagaaagggcctgtgaagtcaatagtaattgcaatcatgatcacaatctctaaaacagatcaatgtaactggtagggaatattgcaacagtgaattacaaaataattttaggttaagaagccaataagaaaagaaactgttaaagtttctacacacatgagagaatgggcaagtggagggttgccagtgggttgagcagaccagagctgctttccatgtaagtgcctggccaaggacagtcgccctgagaagcttggccccagctgctccacaggtaaaatttcctcatcactaaggcatcaggaccatccatcaaggctcaatctgtacgacacctgtggaacctcatactgcagggcaggtcttctcttggtgatctgccaataacaaagcactgacctcatgcatcagggaaaccatgtgcaaccccctaaatcctgtgtacagacttaggaaacagaacttcttgagggcatttcattagaactacaagcaacatgtttttcccacatttctaaccagatcccttaagtaaatctcagacaatcaagaagttctaacgaataatgagagaatcaagtgccagacaggaaataatgaaggataaaaatgagaggctaaaaggggaaaaaaagtggtttctggatattcagagagagctatacggaccttgagctgatcttgtactctagtgatgctggtgcacaaacacaagggtagggacgctatcaggggtgtcctgcataaaggtcagaacagacaacctaaaatgcttccttcacctctgagatctaggattcaaggatctgacacagtttccccctctgggaaattcacagttccacagggattatgaattaagagggtgtgtttgtacttgtgcatttatgcttgagatgtcaaagtgggcaacagataaatctgctaagatattgtaccaaaagacagtaattttcccgttgggaaaaacaatagtagtcacattatttaccagaaacaccaaggagtccatgcactgaacattttataaacattttatgaaaagtaaaatgtgttcaatcctaaatgtcttcttgtgtgttctatggttcagggtgggatgtgggaaggggaaggccatgcaccaccctccaggaacacataactccatggaactccatggagcaccagcaagcagcactctctgaggagaggctgctcaggaaatggttcattgggcttggactagtttcttgaaggtgggaaaagactgatttatattctattttgcagagcctgagccagacacggaaagggatttccaaatagtaagaaagtcctcttagggaacaatagggcatctccatgaatatattttaaagatggttcatcacttaattgggcctgtaagtgattctcctttgatgcctttggagtcaatgattcttagtgattagagatgaaaataatatacataatagatattttttgattataagattaagataaaataacaaaagaatcatagacaaggggtttaaaagcccaggaacatttcatttttgatgatgagcccaatgactgtgatccctaattactgaacctggttctgatctcagtgctcaatgtacagtatgtaattctcacaacaaccccatgaggccagcactttatccctacttcatggaggaagagatgaaggctagaggggctaaccgatttgctgtagcttaagcttgtgcaacccatggcctgtgggccacatgcggccctggatgactttgaatgtggcccaacacaaattcggaactttcttaaaacattatgagatttttttttttttttgcaattttttttaaggtcattagctattattagtgttagtgtattttatgtgtggcccaagataattctttttccaatgtggcccttgggatgcaaaagattggacaaccctgctctagttcatgatttgggccaactcctcactgtggccttgcaggttctgctatgtaatgtcccctgtacccctgataattttccctgctctgatgttagctccatctgatattaatatagttattccagctttctctgattagtgtgagcatggtatatctttctccacccctttacttttaatctgtgtcttcacatttaaagtgggtctcctgtagacaacataaatagttgggtcttggcttctttggcacccactctgacagtctcttttaactgatatatttaagacgactgacatgtattttattcattgtccttattgttttcttttttggtcttccactcatttgctgccttctctagttttaagtgagaattttatatgagtccatttttttcctctctcggcatattataattcttttaaaaacattttattggtggttgccctgagtatgaaaatacatttataactaacccaaatccactttcaaataacactatactgcttcacagatagtggaagttccttataagagagtattcccaattcctccctcctatccttataacattgctatcatttattattcatccatatgctataagcatgaaatacttgttgctattactatctggaacatattgttatctgttagatcaattaagaataagaaaagggctgggtgtggtggctcatgcctgtaatcccagcactttgggaggccagggtgagcagatcacttgagcccaggagttcaagaccagcctgggcatcatggcaaaaccctgtctctagaaaaaacacaaaattagccaggcatggtggtgtgtgcctgtagtcccagctatccaggaagccgaggtaggaggatcacctgagcctggggagatccaggttgcagtgagccatgatcatgccactatattccagcctggacaacagactgacagtctgtttcaaaaaaagaataaaaaaaacagatttcattttacttatatttcttccttctctaaagcttttcccttctttaagtgggtccatctttatgacttctataatttttttttttttttatgatgaaggaaaggcaaggcaggtctactaatcacacattccctcaacttttgtctgagaaggtctttctccttcacttttgaaggataatttctctggatacagaattctaggttggtagttttttgtttttgttttttcctttcaacacaataaatatattatgccactctcttcttgatcgctcagtttctgaagagaagccctatttattacccttgctcttctgcagctactggtgccagcataggagccctctggctcctttcaagattttctcttcttttttggtttcctgtgctttgtatgtgtctaggtatagacattttgatatttattctgcttggtgttcctggtgcttcctggatctgtcattaattttgaaaaattctcagccatgacaatttccaatatttcttctcctttctcttccttgtattctcattacatgttgttacatcttttgtgattgtcacacaggtcttggaagttctgttcagatgtttttcaaccttttctcccctctgcattccagtttcacggtttctactgacacatccacaggctcacaattcctctccttggccatgcccagtttactcatgagcccatccggcattctttgtttctgtcatagggtttttggtttctagcatttcattttaattatttcttggagtgcctatctctctacttacattagccatctcttcttatatgttgtccactttttccattagtatccttagcatattaatcagtaattttaaattgtcaatctgattattctaaaatctctgccatatttgagtccggttttgatgcctgctctgtctcttagaattgtttattttgccttttagtgggccttgtactttttgttgaaagctggatatgatgtattgggtaaaatgaactgaagtaatcaggcctcaaatgtggggttttatgtttaactggctaacaggccgtgcttcttgttttctatagctgtagatgtcagaggttaaaatttctttgaatgaccttgctgttatcacccatgttatttgtaggcttttttacataacttttcttaaataagatctgggatgtgcagttctttcagctgtactccctgttactatacaaaagccctcctgatatcgtagttagatatggagaagaggaagcattctatagtcctaggatttagtctcagtctttcagtgagcctgtgcccctggactgtgaccttcaaaagtgcttttcagttttgttttcttgtctccttccaattccaacttagatgaggtaggagactagaaggcgttggtattaagtgtttccgttcccccaggccagacaggctgtgtgaaaatagtttctcttggctgggcacagtagctcatacctgtaatatcagcactttgggaggctgaggtgagtggatcacttgagttcaggagtttgagaccagcctgggccacacagtgaaatcccatttctccaaaaaaaaatacaaaacttagccaggcgtggtggcatacgcctttagtcccagctactcaggaggctgaggtgcgaggattgcttgagccctggaggcagaggttgcagtgagctgagatcgtgccactgcactctagcctgggtgacagagccagactcggtctcgaaaaaaaaaaaaaaaaagtttttcttgagggcagactttgttaagaacaaaatactttgggtatatagtcatacctaggtatatgagggggactggttccaaaaccaatgccccacccctgtgcatgccaaaatccaagcatacttaattcccacaattggcccacaaataccaaaagtcagccctccatttacatgggtttcgtctcccacaaatactgtatattttccatctgtgtttggttgaaaaaaatccatgtgtaggtggacccacacagttcaaacccatgttgctgaaaggtcaactgtatttccaaatgactgctttctccctttttctgccaaagaggggattttcctccagtttttactgtgagaacctggtaggtatcctagaggtagaactcacaaaagtgtggaggattgtcagccagccccacttgactctatttaactctcagatttgcccacactaagcctcctgcaattggtgaattacaatttaagtattcctactgtggtattggtttcccagaggtttctgctcctgggcttctgttctgataaggtgtgcttctctgtatctgcctgtctatctctctaactttagggacaggggtttgcctggtcatttcaattctctgatgaatctaagaactgtttgattatcagttaactgctgattatcagctcgttctttttcttgctgtgaggatggcagtgatgactatcaagctccctacatactgactggaaaccagatgtctccctatctgaattaaagcagcctccttcctgcccattctatcactctgctttactttctttgaaatacccattgctataagagtctcagctcaaccatttatttacttatttactggccttctcccttactaaaatttagattccaggagagtgggacccccagcccttgacacagtacctggcatgaagcagcctcaactgatagatgtttcctgcttgactgaatgaagcactcctgttcccaagggactaattgctgggcattaaccaaatctgttgctcctttcgacatttctagaataagatctcttgtgaccatctgtcttttgcttcatggagatgcatgaaaggccaggggaagggtgacgggagtggccttgggatcctgagtagccttcttccactgccatagttttgtttggtgggtttgaagaaaatgttccacaattaaaacataaagatttaaaaactgcaaagattgggcaaagctattttgatatcagcgtctacagcacagaggaagcagtcggacctatgagaattcaaatgggagcaaagaaggaggagactgttagttctactagtgatgactaataatgagctttccctctacgacagtactggtagaaaacacaggcgtttcagttccaaacaggaaaattaagaatctactcatagtctaagatcattcgtgttgccaggttcaaataagaaataagaaaataagaaagaataaccctttcttccttctatctttagtaacaccacacttcaaagagtttatttaaaaaatattctatataaaaaaataagtgtacttcctcttatggcttatactaaaagcagtccagtaatcagtgaggtggagttgtaatgaaagtattcatgaaaaaaaaaaaaagagcaaaaaacccaacaacaacaaactaatacatttcaagtatagcatagaaaatactactgtaaagataaattatctgatttggggcaatgagcgctctttccttttcacagaaaagttctgtgtgctctggacacccatcctccttgctgggctgagtggctgacattgtgtgcacctgtgtgcaggaacctaggcagtcgcatgccaaggggtctggggagtgtgctgtctcttgagccaaaaggcccttcctactgagtagctcagaggcagagaatgagagctgccttgctttcttacattaccatttgccatttggtatgcatttacacaggctggctctggctggccaaaggagagaagataaagcaaataagaagaagatgtatatgcaaagaccaacttaaaaaaggggaaacaacgtcaacttctgaggaaaatcagttgagaagaaattctcaaaagccaaattgttgtgaaagataaaacagcagctaagagctaataatagtaggctatagattttcttccatctgtatcaaggcttattgtataaataaacgttctttagtattcttcagcaactgctcgtgggtgactcagtctttcaaaaaccggacaaaaggaataatacaaatcccctgtatctagggaattcctctaattagaagtggcaatgaattagagaagaaatttgattttaatttaacatctgcaaatgacagatgccttttcacatagttctcaatgtcattcctttactaaaaataatgctaataacaataataataaattatccaaacagaacataacatagtaatccatttaataacctattttagtacattctggttgtttggtattttcaatgatcttttctaaataaataattctttgtatattcaaaggttaacaatttattttccctgagaagttcccagagcattttaaagggcatgatttaatcttaaacaggttagttggctgtgattgggataaatatttaagaaaactgcacatataaaatgaaaagaaagaaatttacataaccatgttgcaaagtcaaacactctccctataccgtgaggccacactagtaagcttaaaagacttcctttcaaactcagtgccaatcctaggctcctctcagcctcccatgtgcaaatgctcttgtaacttctggcacaacagccttttcccagcatttctgggcacctgctccaggtacaggtcctgggctagatgtcaccctgaagagggatgcatgaacacacatgaacacacacacacacacacacacacacacacacactcacactcactcactcacaatagctgctgaaccttcaagagagccagcgactacttccatgacgctctggggatagtcaggacaacttaaggaaaggtacgggcagctaggaacaagaggatccaaaaaaaaaaaggcatttagaatccctgtaaggactacagagaagccttggttctcaaccagcatttcacagctgaggaagctaagattcaaagaaacggaaagatctgcccaagacacctaccatcttgtggtaggcttagaactggaactctggtgtcccatctcctgtcttactacttcccctcctacgcttttcacaaatcactgaatcactatcatttttttctccatgctcgtatgtaccagggctgagtaagtagagttcagaggacattagcatattttccatttacaaaagggacactctggttgaggtgaagaggaggacacttcaccaaaacttcctcttgtctcaactgctcctgctcaaggctgcttctgaacacctaccctctggtcaactggtcaccagccagtcactactatgcctggaaataaacatgcccaaaccactaaaacttaccttcgcaaatttctgaaggcaaacactttgaacaccaatattactttccagatactgaaagagagggaaagcagcacgggtactcactgcagtgtggaagttctatgaatcacttttctgaagaacaactctggcattttaacaaaccccttgaatcactcacattctgctctatatgcaagtctttccttgactgctgacttaataataaaagctggaaaaaacataagtctaacaataacacatttcttttctgtgaccaaagaatgattgtgtcaatgtttatggagatggacttattttgaaagtaatttaacaatggaatgatgctgctaagcacactgattttttttttttaaatgaaaaaaagaagttcaatacaaagctcaagaagtgaacaggcccactcagatgagagggttttatgcgttcacacaagcacacccacacttcttcaacataccatttcacaaatgctgtgtattattaagaggaggcggattctgccaggcacataatttgtatatttaagggaggtgtatggaatgaaaaagcgaaatatgttaaatttcaaaggacttggaagcaatgctgcctgtaagcttgtattacaaatagccctacattattacatacgctattaatgaggccgagtgaatgaaagtacaatttgaatatgcatgactctacccaatgagcaagacttttgtgtactgatgaggtttttttttctcccaaaaaaggattaaaattattcttagaggagtatggctgcccagagaacagtaaaataaatgtacttagaccacagagtcatactatactcagatgaaatacacaggtgctaaaagaatgcctttgactctacctacaattttggaaacatgcatatcctgtccttcaaaaggaatattccttaacttcaagcagctgcgtcattacaatttctaagaaaaaaatacggattttggtggagatccctaaaagtaggcaaggttaaataaaccttttgagtacaaagccttcccttccacagtaaggagcactagttaaaaggctggggaatgggtaaattattgtaccaaatggctgagaattaatctctgctgactagctgtaatctaacgaggcgtctgtgtcccagggagcccgcagcatgtccctggcggtatgtgcagtgtgtcgagtctgcgtggcaccctttgtcctcgctcacaggcggcctttcccctcattgtccgtaatatcctcatgcatctgggacgcgtggaatgcattcatactaacagacttaccattgttttctctcagaagctttgttgagcaaagactgcatcacggttactgataattatattgcttaattaatcaagacaaaaaaaatttgcaaatcattgcctggttgccaagcagggagataaaaaatgacaacaatacaagctgaagcaatataacaaaagtaacagctatctgatcagaaattcttatataatgaagctattaatgctaaatcggttaatgttaacattgctccaggtgtctctacttagatgcaaacaaaaaggctaacattatggatataaaaggccaaatgttgccatggattctgtaacctgatagagaggacagccttttcatttgattagggaatgcaatttaaataccagggactgaagccaaacaaacagactttccctccgcaagcctcttgcattcaccctggggtcagtggttggtgaacaaaaggtcagccacacttgccctggaaatgtctggattaattttattacattgtaatggtttgtactttaaatgtaaggataatactaaatttccagttggccattattctcttcttccctttaggctttttgaattaaaatattaagaaagcgatttgctcaattcatcttgtcagaatttatagccaaattcattaaatgtgcaaacattttataagaaagtttacaaggtatgttaataattatattcatgcattataagtgtactatctttttaaaaaatcaaaaaaatcacttttgattctataaagtgaattaaaatggcttgcatgttttttacttaaaaataaaggtgacatttttaggacattaaatgacattttagaagcccatgttgaaaatgagctaataaagccaattaatccatactaaatattaaagaaacacatttcctctttttgaaagctataagacactaaattcactggttctcttatattaaaattttcagtttaattctttaaagtagtgctcttcatggacaaatacaaatgttagcactaagagccattttcatacacaaaactgaaaacttcacgcacatggagatcagaataaaaaatgatgcaaatatttaatatgaagtgacttttggcatctgcgttccctcaatagaaaagagggttccctttatgtcaggctttgcaacagccagaatgggacttttatgaattcaggagttgacccacaatgcatctattctgagaataataagcatgttaaacttggaattcattaagtattctctctccatagtagtaataacaaaaaacaacagcaacaataataataataatagctaacacttaagtagcttttactctggaccaggcactgtttgaagcactttctatttattagctcatttaatcctcacaactttaaccctttagattaggtcataaatcccaatatgaacaataaatctgttgcctattatttcaaagctttaaaagagagttttcagaagggtaactttcagctccttcaggagaacaacttgaaatgaaaatgaagattatacatactatcaagctgaaaaacacaatgtcattcctcttgagggatggcttaatatgctaatgtttaatttaagaactttaaaaacgcccttctattagtaattctaaaacaaaaacaagtcgctacataaagcatggctaaaataccactaaaggtatgacaaggatcgaaactgcagccaatttagtacacagcacacagatcattggattgttccagctcttcccatgatcaataccaattgacatggctgaattgattctgcagcaaggtgctccaattgttgaaactcatcacgtgggccgtgctccagagtcccggcctcttcgtggacatgcctgcaattctgcaggattgaccccattagcacagtcagaggcttggcaagtgcccgacaccaggcaaggctggattccatacccacggttctccacaaaatgctagatgtgatatggggttccttcaactcttattattaatcaacataaccaaaatttcaagatacaatttttcaaaagtacaaaatttagaaaacttaaaacatttacaaaataataaatttgacattataatttccaaagaggcctagtaatacaataatacaattttgtgctcatgatgaaaaattctttgaaaatcccaattcatatttaattcctataaagcatgcataattcagatatatgtaagacattcaacaactggatgagagtcccctttaacatatttgtatcactgattttcaatgacaatgaatcacatggcaaatgctttatgagtcagtacaacaatgcaatgaaaacgtacctcaggtttcttcgttatcgcgatgaagaacatgtgattcttcattgggtaaataatgattgaaacatctccaaaggcagttgggataatacccctgcggtagtctctggagtgttcagaccagacgatatggacctcgtcattccccaagtgacgaagctgcaacagcaaattgactgtttattaatcagggtgataacagcagtttatgaggggtcatggcttacaaattgaattataaaactcaaaggccaaaaaaatttcactaccaaaaaaggctacaacattgatgttcttctgtgaggattttaaaaagcacaagtgcataaaaacacagcctgtcttcttaatgtgttggtaccaagataaggcatgctagcttcgcaggcacattacagctggatggggctgaggcctttgtaagaatttattttctaatggaattttactcctgcgtcagagtcctgtgctttatattgctgaatatgtttctaaacaattaacaacacgtgtcttttattccacattgcagttgtgctttataagattctcaattcaatggttattatgaaaataagaatatgaacataagagaacataagccactacaacacaattgttaccaaatgtataagaaactagatttgtgacaaacctttaagaaaaggacgtataaaattacctttgcttaggaaatgaataactactgcttaagtctgataagaacactcctacctagcatttaaggagtgcttactgtatagaagacatgttcacacatactatctcatttaatcttcccactaactctctgaggtagatgacatcatcttcatcttactgtacaaaaaagaaatgggcgctcaggaaggtgaaggcaccacctacccgaggatgcatgagtagcagtggcagagtgggcccgggacatgcactggggcttccaattcagggccatttccactgtttcaaagctacctaagcctgcacccaaagttactttactgtcattgcttagtagtgtagcccacttgttttatcatcttatacacaaagaggctgtaaagaacaaaaacaaatcacagactcctggcgtctttgaggaggccttactagaaagatctccaaaacaagaccccttgagagttctttcaggcccaggctctgtcaggtgtaagaacacccttgatcaatctcctgcacgatgaccgtaccatctcaagctggagaaagctgcacacgaaatcatttaagtgacaaagaatcaaagtgtgactaaaagaaactagattatgaagattaaaatgttggccaaaattgaagttctgaaaccacaaaagctggtaaggccctctgacatcttctgggaatttgagattctcgttctctcacgtggaactgcagaaggatgctctctggcaccatgaacaattatttcttgcttccttatctaacagatgaacattaaaaatgactaaattcagaagcagtttaataaaatagagatgtgtcaaatttaacatttttagttttgtcttaaagtattttttaaaaaggtgttctggaatactatgtatttaaaacgtgttagcataaatacagttttctttagactatttgaccacaaaaagaaaatctgaggtgaccccaacatagcctcttttctgtttataaggttacaaaaggaagctcatctgttgcaatgcctgtttattcttcactctctcatacttctgggaatgactgtacaggccaattatttaaaaagtgacctgtgcctataccattgtacctatactgaagggtgcacgattcaactgtgtttgaatgtgggctctgggacaaatgcaactgcgggtgctgagcacaagtcacgatgatccagaacaatttaatggcatctccgactttctaatggcaaaattacccagtacatcatttttttccttcctccttcccacataaaagtaaaagaatagcaggcaaaatgtatagccaaccccttacatagttttaaacaaaatacaaccctgggcctcctagtagtgctgaacatctctttatatttctccattcctatatttgctacagcttttttctttttcctttttaataaaacatgcaaagacattacaatacactcctaaaattcagtccttttgaagtgaaaacacggtagccagcatcaccaagaacctaatataggtatgttttcggggaaatatgaatagtatctaactggaactgtaggaggaattgagacctgcagaaagtaattgtgagaactggggctgtcctagagttcacacagccctcaccctgcaaagacagccagcttcagggtggctctgggtcccttggtataatgcttgcacaaatgtctgaatggaaacactcacctactaaacacccctcaaacgtgctgccaccacccgatgttggtgctctagtatctgtgatagctccttttgatccacaagtattagttgcaaaacattgactgtgaggtaataccgtgattattgaagttttgtagttactttcccatttcaaattgggttactcaattacataacctaagtaagtatctcttaattttacttgcatctgtatactcagaactacagcgagggaggttagtttcacactaacagacccattctcccagtgtggcaattctgtaattaaggaagagcaatttttgtgtggtaatgatatgatattcatcttctcatagctgctttcagtggcacgtgactcagacttctggatatgtcacagtttaattagctaaatcacaaaactaaaagctaaggccatgggagcaatcggctgataaatctggagcaaagggcaaaatatgccttcttttgcctataagaaaacaggtaggtaaaataaataaaattcatctgggcaaactgtcaaccatgtcagaacatacggaatactctggatggctcaaagtgttgcccaatttaaagaagagtccatcattgacacatcattttgtgagtattgaagaactgggattagaggccctcaaattagaaacccatcagtgagttcggtgagtgcacacaagtcaagttgatctggttcctgtgtaactggggaagaatgatgagtctccttctggaatggagccggtgtttatgttagctactccttcaactgcacaacaggctccacaatggctggatacttatcaggctcagaacaaatgctcagattttaagtcttaagaaatcaatcccggacccacaacttttcatcctaacagagttttaaagtccctttgcctaagccattctgtctgttgctgctgccaggctgcacgccactggtgacaccggtcatggtacacacctaataggctgacctcctttctcgactaattgcattacatcgccagctggctccagaaggagtcgtctgtttgattgaagaattcctgctcctcagtgggcccggctgctacttttactaagtaacagtcaggcctgacatccccattgttcagctgacagtgtgcccatcctaaaatctaagttttatttgtaaattaaccaagaaacttcctgccagaacagcgctgcctggagactgataatgtgggcctttcatcccttttcactcgtactgtatcactgccaatttgttttttatgtggctggccagcctgaggctataaaagccttgtaagacataagtgcaattatagtcctggagtcaaatgaattggacaaatccaatagcacagctctgtccccactctgcaaacccctacagcagttagattagctgtgaaaaatctaatctagctagagctaacaaatttctgcagtgaaggatcaagagttcagtatggggttgcaactggattgcagaattgaaaaagtccccccatgatgggggcagaagagagcatgaatcactttagaattttgcagctcatttttaagctgttagggacaatttagttagaataagacaaggaactgtgggctgctgttactgtgactgatttttagtctagctgtgagacatctgataaagagagtttatcactaatgatgctaaaccttacagctgcaaaaggtatcagctgaattttgattattacagtagggaatcattcaaccaggccaagtcttagaacattatttacagcttggcattttatcaagaaaacatgtcttttctcaaaaaagaaaaaacagtcctactttacttaagaaataatttaaaaaatattttatatataaattttatcttttaacaaaataattctcagtcataagaaaattatagaatatggtgacacatttgcaaagcagaaacaatttacaatgtactgcaaataaaaaagatgtgtgagcccagcttaggatcctggtaagctacactagagtctgagatcctggtgaattcttggagggcagagttccctttgctgagagctctacagccaggggcagccatcaaaacccaacactgaggcagctcctccaagacgtgtgggaaccagcacgtggtcagcgcttctggctgtagtactgccacccccaggaggtcattatagcatgctggggcaggagagggaaaggctgctgagtttttgaacgcaaattgtactttctacatctgagacacttgatcactacggaagttgtctgtaattgggccatgacttgagttctgatgtttcacatgcactgctgcccatcatatacaggcacacctcagagatattataggcttggtttcagacatatccgcaataggttttttagatattgcaaatacagatattgcaataaagcaaatcatataaacttttgtgtgcactgggaaagcagtgtgcataaaacttatgtttactatagtctattaaatgtgcaatagcattatttcttaccatatgtatattaataaaaaaattttattgctaaaaaatgctaatgattatctgagccttcagtgagttgtagtctttttttgctggtacagggttttgccttgatgttgttggttgctgattgatcagggtggcagttgctgaaggctggggtggctgtggcaatttcttaaggtaagataatgaaattgccacattgattgactcttcctttcatgaaagatttctctgtagcatgtgatggtgtctgacagcattttgcccacagtagaacttcttttgaaattggagtaatattttcaaaccctgtcactgctttaccaattaaatttatggaatattctaaatcttttgttgtaatttcaacaatgttcatagcatcatcactgagaacagattccttctcaagaaacccactttctttgcttatccataagaagcaacttttcatccagtcaaattttatcatgacattgcagtaattcagctacatcttcagtctccacttctaattctagttctcttgctatttctgctaaatgtgcagtgacttccttcactgaagtcttgaatcttttaaagtcatccatgagggtgggactctatccaaactcctgtgaatcttgatatcttgatctgttcccatgaatcacgaatgttcctaatggcatctagaatggtgaatccattccagaaggttttcaatggtctttgccagatccatcagagaactcactccctatgacagccatagccttatgaaagttcttaaatagtaagacttgaaagttgaaattactccttgatctgtgggttgcagaatatggatattgtgttagcaggaatgaaaaacaacactacatctccttcagagctcttgagtgatgaggtacattgtcaatgagcagtaatactctgaaataaatcttttattctgagtagcaggtctcaacagttggctttaaatcttcagtaagccatgctctaaacagacgtgctgtcatcctggttttgttgttccatttattgagcacaggtagagtagatttagcataatgtttaagggccctagaatttggggaatggtaaatgagcactggcttcaacttaaagtcaccagctgcattagccctaacaagagagtcagactgttcctttgaagctttgaaaccaaacattaacttttcctctctagttatgaaagtggtagatagaaacttcttccaatagaaggctgtttttactacactgaaaatctgttgtttagtgtagccacctccatcagtgatcttagttagatcttccagataagctgcagcttctgcatgagcacttaatgcttcgccttgtgctttcattttatgaagacagcttctttcctcaaacttcatgaaccaacctcggcaagcttcaaacttttcttctgcagcttcctcacctctctcagccttcataaaatttaacagtgtagggccttgctctggattaggctctggcttaagggaatgttgtggctggtttgatctgttcagaccaccaaaactttctccatatcagcaataaggctatttcgttttctttatcattcatgtgttcactggagtagcacttttaatttccttcaaaaacttttcctttatgttcaaaacttgggtaaatatttggttaaagaggtctagcttttgccctatctcagctttcaacatgccttctaatcattcctagcttttgatttcaagtgagagacatccaacttttcctttcacttgaatactttgaggccatcaaggggttattaattggcctaatttcactactattgtgcttagggaataggaaggcccaaggagcggaagatacataggggaacggccggtgggtggagcagtcagaacacaccgaacatgtatgaattaagtttgccatcttataagggcagtttgtggtgccccaaaacaattacgatagcaacatcaaaggtcactgattacagatcaccatatgagataatgataataataatagaaatattgtgaaaattacaaaatgagacagagacacaaatgagcatctgctgttagaaaaatggtgccaatagacttgtttgattaagggttgccacaaatatccaatttgtaaaaaatgtaatacctgtgaagtgtaataaagtgctgcacaatgaaacaaggtatgcctgtacatagtccagacatctgtggctgcagtggtgaaaaagcaaaaccgtacaataaagaaataaagcaggtacagtgaggccaatcggccaatataaagcatctggctaacggggcagggggaaaaaaagaatcaattagaccaatgggcaataatgagggatgatggtcagagacatcttcccaggcaccgtgctaagcaattttataggaattatctcatttacttcactcaacaaccctgtaacataggctgtgtttttaatctcacttaatagatgaaaaactgaggcacaggttgatgaaataactgaatatacctctgatccctggtctgcctgtcaccggagcctggctataaccaccacagtagactccccagtggccagctttggtcagcacgtgaggtgctgccctcagtcccttgcatttatgtggtagggagagagtaaggtggggattctaggttccccacctgctagcaggccaggtgagtgcatatcacagttgctctgagacgttctcctcatctggaagcagatctgattagaggcttccttcccagagttaaatgcctcttcttttaaggcgctcctcacttttaacacagggttgcctgaggcaaacatcctgcaggttggaaagtaaaggccaagttccctgggggaggttcctcaggggtggataaggtttcctttgaattctaaggaaaactggccacaaggcaagttgaagaataaaaggtaaggggcaacagtggggcggctgagcagctgcacacctgcacttatgttgacagatgctgccaaatcgccccgcagcaagcctcagaggggcctgctttcccagagccccaccagtacagggtcatcatattttgtaacctttgacaatctgtgagatcaaaaatgtcattttccatcaggtaatattcacgggagggaagatccaaaagtaataacatttaagacgccttctttccccaaaccttaatctcagggtcgtagagttcagagaaaccatctcagtgtgcgttctacccttgtatttgtctgtcctaggagagcctcacctacaaaccagggcagctaagaatggtgcccgaggagaccccttacctttttggtgagggaatcatctgagtctgacggcattcgagtggaaacatggaaaatcacttccacagttgaggtagcatagtaaggggccgtctgcccggtgctgccattgcgctgaaggccacccatgaacccacagtgggtggagagatccacctgacaaaggtcacaaagaagaaagagtgaggatcaaaaatgagctgctctttcactaagcaggactgtgaattcagaaaaaaaataaattattttcgtttttatatctttctttctgattacaaacaaatgtaatacaaagttagaccagattaaaatgttaaagaaataaaaaacattaaaaatgaaagtgctctacaatcatatcaactgaataaaaccactaccaaacttttggtatataatctctaacttttttcccacctgtatgtataaatgtatgtgtatatatgcatatatgtgtgtgtatacataggttccctattgatggattttgggggtttctgctttttcaaaacagaaagcacactcaaaggagtgtttttctaagatgttgggtcaaaaggtaccaatattaaaaatatttagcaatccttgctaaactgcctttcaaaagggttgaacaaccactttacaccactgccgaaagtttatgagtcataattcaaagttacggcatgagtgttcacttcttagtgcctttatccaaaatttttaacttgtcataaactagtattctttcagtaaaatacctattctaacatatatgaaaaaagaaatagaagaatctcttctgtgccaaatagagtaaacatatactctcaaaactctaattgataatgtatggcttaaaaatatattaaataacaactatattctatgacaaattagaagtagccttactagtgagaacaatgatttactggaagtacagtaactgttagactcaaacctacttgccttcttagtaaggatgtcgttttgactctgatgtactcttaccctgtttccatccctgccttagtccccttgctagcactgagctctcaaaggcacccagagagtttttcagagcacaggtactcaagaaactaataaaaaataaggaaattggccgggcaatcccagcactttgggaggccgaggcaggtgaatcacgaggttaagagatcaagaccatcgtggccaacatggtgaaacaccatctctactaaaaatacaaaaaaaaatcagctgggtgtggcggcgcgtgcctgtagtcccagctacttgggaggctgaggcaggagaattgctggaacccgggaggtggaggttgcagtgagccgagattgtgcgactgcactccagcctggtgaaagagcaagactctgtctaagaaaagacaaaaaaaaaagaaaaaaagaagtaaattattttagatatgttgatttccattttaactactcctaattctttcagattctaggaattttttttttaggtttatgttttttggggaaaggtgtgtatgtgtgtataaatgtatatatgtctgtatgtcagagtaccatttaataaagaaaaaataaactttttcaacatcaatcatcctgaaatctaccttagggaaataggttgatagctaaaccatcatggctattatattatattttcattgcaacttttgacttcatccaactctttcttcatcttttcacccatcaagtcattgacttcttcttcaatctccatactgtggccaaagccattgcttctctgcccacatttgtcttctcttactacaaactgtctatgtctgggagagcccatctgactattcagttctgataaaaagcaaatgaaaaaatattaagaggaaagttaaaggaaaacaaaagttcatgtattaaatactgacaagcaactaacagatgtcaaatccaataaattcttcaattccagaactctatctatgctatatttgaatgcaaaagcacatgtaaaaacttacacaatgtctagtttggacacatctttaaacagtgctggtcaataaacacctactgaatgaaatgcattacctcccatccaagtccagcaacaaagtcttcatatgcttggcttcctctttcattagagaggattgaacacttgtcttcttgaccttcagcaatgtaaaacactgcgattttgtgtgtctcacggctataaatttttaaatttaaaggagttagaattcttatatgtaaaattttacttcactactattaataccaccagcatgacttctaccactgagcttacatttactgagaacctgctagaggtcagtcagtgttctgagatggtctgacacatagtctcatttattcttcaaaaccatgctaaagagatgagtattattatcacctccctagtagaggtggttgaaaggaggcacagaaagtgaaacaaaaagcacatccagcaagctggggatgggaactgtcgcaaggccatctgcttcctgagaccataccctcagacataagatacaccgaccagaaggctggggcacaccatttggtaagttctctgtttttggtaaaaaaatatcttttaaagtatttcaaatacatataaattgtgaatagatctatgtgactgtccatatttaactctacactttaaggctactgggtggctctgtgattggaactataaaatatgccacgattttatgagaaaaagaagatccttccaagcgaacacacttaggtattttcttcatgaaggggtttaccaacttctgtactctgactattctgagggtgcctgacagggtggatagctatttagtggaaccccttttagccatataaacccttcatctgcttgttccaacatagatcttggatactctggtatcaaatcaagcaaaagtgatgtgtactttgaaaaaagaagccctgccattttctcttttgcacatctagcatactgctttgcatatagtaggtgttcagttaagtctctgttacactgagcagatatatggtgatacatttgaatgcattaataataaatttctacaaattataccctggagtaaagcgacaaaatacctgggcctagaccaagcatttggtgatagtttagagatgaaacactgttcttattcaaacggagctttgattacgaatcattcattccctagcccaatcacccaagagttttggtttttttaaagtttcgatgtccacttccagagcggttccaactttctcctttttttgcactacattctgataaatctcataggaataactgtcaagttcttaaatacagaaatattttttctgtcaaatttaatatttaattttttaatatttgtttagtatttcaacattgtaatttgattagatattgtattggtagaactgagttccatattttaacaaattatctaagatttccttctgtgtgagttatttctctacttaataatcagaactaactgattctcaattaaaaagtcatacaaataactggaggaagagagttctctccttttactcagcttattcacttcccctatggtttatatgcaataaacatacttggaagaagaattagaaaatacagaaagaaaagagaagaataaaaatcacttgcagtttcaacggataagcaaagaacatagccgttacaccattttaggatacacttttgcatgcacatatgagaagctactacattctgttttacaacagattttttcacttaaaatatttgtgaacacttttttattgtggtaaaatatacatatcataaaattcaccatttcaaccatttttttagtgtgaacacttttatatcatgtgcttctacaacagaggtttaatgattgtaacaacattccattatattaatatgtcatggcccaaatcttcatttaggttgctttcattttaaaagacattttcacgttatctttaatacatccttaaagataatctttaatgtttttaatcttttcacaatatctttttttgagatagtctcacttcgtcacccaggctggagtgcaatggcgtgatcttggatcactgcaacctccacctcctgtgttccagtgattctcgtgcctcagccgtcccagtagctgggactacaggtgcatgctaccacacaccaccacacctggctaattttttttattatttttagtagagacagggtttcgccatgttggccaggctgatctcaaactcctgatctcaggtgatccacctgccttggcctcccaaagtgttggctttatagggttgagcaccatgcccagccccaatatctctaatatgtccttaaaataaatttagaaaacttgtcctcatgcagcaggaagccctgaaagtgccacaccattcactgccctgagcaacaggcaggggacaccaatggcgtagaatctaactagcctattccaagagctataaaaatttgggcacttggataataacagaaaccataacctatgacctaaaagactgtctctttcaacaaaagtggagaagtatagttattcagtttttatctgaaggtctctctacatatgtaaaaactcctcagcatttaatttttctttgttttatagactttacatacataaaaacagcctcaggtttatctacaatgtttcagtttattctccttaaaaatctaagctgtttccattgcagctgttcctaagtccttgagccctcattaactcaatgtgagagcacaagagagctaagcctgaatgatgggctgaccaatgtgagtgtgaggaaagatgacctttagttgtaaacattcatcaaatttcacattctccaaaatgttagtaccacagagagcctgctaggatgcagaagctgtgtctggccttattaaagccatgcttttgaaatgataattagcaacatcaacagcacttcacatccataagaagcacaccaatgcatgaaggagcaggtaattcagaaacacacatacatgaaattaacaatcttcccttcctcattagaatgcactgttctttcttattaggaatagaccagaatagctcagtttccttgtgctgtcacatgaaaaagccaaagaaaagcatgattttaacatccacctccccatgtagtggcaagaaggcatttacatctaacagggaagcccactgtgatttgtatgtacattcatcatagcactgacaatctagaccatagctgcaagatagcctcaacttttccaaagaacatgttaagaaggaactatacatcaagagcagtgagatacattgatatcagaattaaacagaaatgttctaaatgaaagttgacagacaaggtattttcttacctgctacctgaccaaaatacagggcagtctagatttctcatagctgaagagtcccagacttatttctagtttcttcaaaaagatcttgaaaatacccttcaccataaaataagttgatacccatttgatgtcaagaagacactaaatccaggagttggggttttaagtgaaggttgatcaaggggcaggggactgccactcagctattcaaagccatatttcgttgcaacagtaccccagggagctaattcaattgtacctcatgcaactaaagtgcattaacgctcaacaaattgaccgcaattacatgaaaccaagtattcacttaatactaagaagcctggaataattcagcatacgcttaaaaagctgagtgtggaacccaaatgactgcttatttaatactgaaggaaggagggagagtgtggtgaacccctgagttcttcagaataaatcccttacagaatttccatagagaagttgatctatgttcctctagagaaaaggaatcacaagaagaatcaggaaacagaatacagtgaagggcaaggtgagaaatggcagcttcaggtttttcatttctaatgactttaaaaaattattcaaattcaaatcttttactgtctcacctgataagtcaggaaacaaagacatttaaaatggcaatggagctgcaggcttctggacagagaatggctcctttatccaggtaaaactacaaatgaatattttaattttgtgtttttaaaaaaatgtctgcatatttgatactgaaatatttatcactctttaaggccacctaggaaaaaaggccctcatgtccccttctgcagagggaatcaggtttggaacagccatcctgtcacattcccaagacttggaaacatacacaaaacagttcatgcttcaacatgtatgtagctatatgatgcaataagaggcgctcagtgacctgggagacaggtgggaaagtagaagggtgaagaaaagaaaagaaaaaatgaaaagaaaagaaaacttatgcccttctgattcccacaaaatggtcaatacaaacaaatccatcttaataccatatgcttctgaaggatggaaacaatacatagctgtgagtaagtttaatattattttatctactcagtccttagtgacattaccaaaggacctttctgaaatataatcttccaagtgtttaaaagaaaattccaactggactttgctagttgggtttatatccaattcaagaattcaaaacaccaaagaagaatcacagttgtgaaggtgatatgcaaataatagtgacatgaaccaagagtttgcttgaaaataaaatttaagcatgtgtcactttgggtttcgatcaaaactctaaaataaacaataaaaccatcacaaagccactgaaacacacacaatggtgaaaatgttcattcagcaggctctaactcatcgctgtaagtgcaagcaggagaagctcatgacttagatgagaaacgtgacagtggatgaaggatttaatgaatggaataaagagctctagtaattttctgaaattctaagatatgactttgtcaagataaagcagggctctgttatttcctttcttccttcttacttctcagccagcaactgtaccaccctttaaaaacatatagatcaaaacagatttgaaaatttttgagttaatgagtagtaagaaaaatgtagtgaaaaaatatagtgtgaagagttgaaaaataaaattgaggaaaacaacctgaatttttaatttgagagctgacagaatattagaatattcctacagggaataaaagtggtgttttttttttttagagttttttaaaaaactaaagattaaggaggcagcttattctcttcgaaactttggaacatctgttatgtaccaagtcctatacttattcttgacttagatgatttcggaaacacacattccccaaatcaaacacttttcatggttgtgagctcatctttagaaatgcttctgagacagtatagaacaggggtggatctgagtctggccagctttggagaatgagccttattaacagagagttattaattacaacacactggttttaacctttccaacactatgaagccacaagtacagaatgttagcgccttgatacacaacatggattctgaagtcagactcacttggctttagataatatggtatgagcaaccacgggctgttaaacctaggtaaactttttcttcatcataaggaggtggttgcagagatcaaatgagaataaatttctactggcagccacaaagaaagataatcaaaagtacagattaggtgggagtggtgacctctttttagtgtatcaaacatgaaagtttattccttatagtaaaaaacaccaacggtatggcatgcgcaaatgtcaccagatgctaggttacagaactacccttggatgtctcagtaagtctattcattcctgctgttgtatctgttatccaagaatacccaaagacaaacaggaaaaaagtggtttgatatactttcacataccactggcgggagtccaaatttttcagctctctcaataattttgaatttttcttcaatagatgaaaattcttcctataaagaaaaaaggatggaagaaaaaccatgtgattacagaaccattttgccgcttttcaatcagtaatttaataaaaatacctatcatccatcctctaccacctcactcacaaaagatttgtgatagaaacctacagaatgaactccatcctccttaagacatgcaaaggtataaaaattccatcagcatcccattactacccagtgacacagatggctctttggtgagtatgtgacttacatgcatgtgcctgtgtgactgtgtctgtttccagtgtcagctctgctgtgaatcccttttccctacctctgttcttaaaaactccactccactatcagggtccagctcaaatcctcccctttccacaaagtcttctccattgctctgtacttcccattggatttaatcattactcatgaactcctgtgtcattctatcctttatcagagttgtattaggtctatctcccacatcagacctaaggttagactgtggcttattcacctttgtagttcatttgcttcctgcatgagggcagaaacaataatggacaaagcagtaattaaaacacacacactcagccaggcgcagttgctcacgcctgtaatcccaacactttgggaggccaaggagggtaaatcatgaggtcagtagtttgagaccagcctggcgaacatggtgaaaccccgtctctactaaaaacatcaaaaaagccgggcatggtggcaggtgcctgtaatcccagctactcgggaggatgaggcaggagaattgcttgaacccaggaggcggaggttgccgtgagccgagaccatgccacagcactccagcccgggcaacagagcaagactctgtctcaaaaaacaaaaaacaaacaacaacaacaaccccccctacacacacacacacatacacacacacacacacacacacacacacaaatgtttgatatcctttaaaatatccaacatgtttggaattcaatctgcacaccagtacagcataatttcatttctagctttaatttagtagcagaaaataagctgcaaatgttaaaataaagaaaaatctcccttctcctctcttccccaatcttttcttcttccccaaccacaaactgataaaaagaacaagtacatgaaaataatgataaaataactggaggtctagcttggattgttaccttctgtcccaagaattcattcccaagtcatcaagcaataacctgcagaaataaaagggtcctcggggctccactggggagggctgcccttggctggtgactttcattgcagaatcgaagttatgactctggatatactcatcctcttgagcattttggcgcaaaatgacctcaatgatttccttctcttggtcatagttcatgccacatggggttagggaaggttcatttagatttagctgtgacggtaaaaggcattcaggacttgtatggccaatgttttcaagtaatttgtcaagaacatcatccccctcctcaacttgagaagagtctttctgaggtccaaatgtgtcacgatgccagctcgaaatcagaaatgaaggatttcttccattgggtgctaagcagccttccaaaggtccatataaaaccttaccatcccaagagtacttccctgagatatccctcacaattactctcacatcagagagagagcccactggtgatccccctaccggtccttctgtgggtgtctgaaggtaggagatgagggtgctatcattaaatacaaacagctgcaggtttggacttctgaacacctcaaaggacagctcggagccttccacatgggcattgtcatggttctcgctgacaaggctgtgcagtatggcagggcccccactgagggggtagtgccccaggtggttcaccaggtgggccatcaccattcgagcagtcaaagggatcaactccaaacttcttctcttcttctctgtaaacagcggtaaagaaacataaagagtcagtggtgaatgaagattaaaactcaacaccttttttttgggtggggggcagggggcagttccaatatggtagattacaggcttttagtgtgcctcagccacttggaaatagcaagatagtgcaaaaagatcaactctctgagctttaattcaggaaggaaaatgggaatccactggaatcgtgaaggatgttccagatctcagggaggacaatgcaggcaaacagcccttgtgatggcatccagctggtaagagtgagtgaagccccagtacccgagacagaaacagtctctctctgtaatttacccttccactggggatccaagcaacccaggccaaggcagagaatgatgtttctctcaagccccagagctatcttggggagagacttggaggtgctgagaggaaaagacaccagaaaaagctgcaggcaattcctagatctgggactgagagacaggagcacttgctctggagtggggcagggacttccacagccagaactgtggaaagcgcaccagcaggaggcactggaattgcactcttctcaactgcaggcttggggtgggaggagagagctgctacagctaaagtttctcctgggcaatgagacttgcagccagggccagcttggcaacacagaatcagtctgcatgtgtcattgctgagtgcaccaggctgctcccctgagatcatggtgcagcagggccctctctgttccattcccaggcaggactccaggcagtaagtggaaatcctttcctagactggcagcctgagctgccccaaccttcctgtgcacacatcatggtatagtagggccctctccactccatgcttaggcagatctccaggcattcagaacacctgcttgcctggatgagcagcctgagccatgctacccttcctggacatagattgtggtgcaacagggccctttccgctccgcacccaagcagatctccaggaattcaaagcacctgctcacccggactggtagtctgagctgcttcaccctttatgtagagatcctgcagcagggagcccctctctgcttcatgcttaggcaggtctccaggcactgagagctcctgcttgcctagttcagcagcctgagtctctccatccctcctctgccgagatcctggtgcaggggaaccctctccactccacatccagatggatctccaggtattcggcacacttcctcacccagattggtggcctgagctgccccacccttcctgtagagattatggtacagtggagcccattccactccatgccccagcagatctccaagaattcagagcacccactcatctgaatcagcagactgagctaacttgcccttcctgtgcagagaccatggtgaagtggggtcctctccaccccatgcccaggcatatctccaggtagctgcagtgcctgctgatctgggttaccagcctgagccaccccacctttcttgtgcagagactgtagtatagcagagccttttgcactccaagcccaggcagacttataggtacctggagcacccaaacccgctctcctgatcaggagtttaggtgcccctctgcctgtgcagagaaccaggagccaaggagatttcccagctccatgtctaggcacaccactgggcacctgatcgctgcccactggattctccctcagcactgctacttgtgcccaacaccaggggagctgtaaatgagcctgtccagtctggctcaacccattttgccccctgcccacccagggctaagcagtgagctcagaccactgtgcattccatggaccactccattgcctgaggcaatagagagcttctgctggtaaacaaggatcaagtatatacctagccaccttgcccacagccagcttttacccataaacaccatctactggcttgtaggtcaaatcgcacagccccatataaaacctgccgacagaagtgcatagggctatagaagcaaatccagaagatggcagattggaggcagtgttagcatgcgtctcccactgggaaggacagaatagtgtgtagagattcacactgtgaacttttttccaaggagcaatacaggaactcaacaggaaaactgcaagaatccacagatcctttgaaagaagcagaaagctgaagtctactccatgagacaggtaaaaaactataaatcctcagagtgtcagtcgggggagactaccttcagaatacacatccctatgagggaatctgaaaatccaggtcatgggagaaggccttaaccctacccagagctggaactgcttaagggagtgatgagaaacataaaagtagaagcagcagcaggaaatgccttgcaggcattctcagtctccagcatgaaccgagggaagccatacctgaatatatctcacaggggaccttggggaagccagtcaactagctcagaaaggggttgcagggtgaaagatgctcctaactgaatttcgtgatataatctcgagcagggataaactcctttgaccagaaccaatgggagtggggcggggggggcagggaagtgcactgcagacacatctgcctcatgggcagacaggaggggcactacccgaaagccaggtgggaaagcttatggcctgcggcagatctgggttctgcgtgcagactgcctggatctaaacctggtgctgctagtagaacactgagggagtgagaccggccttgccaactgcatgggagctgggcaaggcttactgctgcctgctactctccactcccattgtgaactcttctgtgcagcagaggcagttatactatctctggaacattaccctgaaaaccaccccctgaccctcaaaggagccatggctggccccactcaaggagagtcagagcacagacctgctcaaccctatccccacctgttggtatgtatccctgcacccaccctggtagcttaacacaaaggacataaacttgtgggagctttacagccctgctcattgcctcagaaccagattacttcccctaggcaatttagggcaagctcaaatcccacagctagtactgcagctggtgctctcttgcaagcaccacctcatggctgcaagctagctgatgcagcccactacagcatctacagatggaataacactgcccaggaaggagaaaatggctgaatgacctcagctatcaccactgcctataatactctagccaccagaggtcctgagcctgtcgaagttaaagttaactacaattaaaaccagcattcaagaaagccagcacactaagcatatctataaccaagcaatctcacagagtctacatcactcccctgccacctccatcagagctggtgctggtacccactgctgggagacttgaagaaaggtcacatcaccggatcacctgcagacatttcccagcagcaacctggagtgtggcagccccactgggtggctagacccagaagagcaatagcagtcacggtagtctggctatcaagaactcctattcctagggaaagtgggagagcaccacatcaagggaacaccccatgggacaaaagaatttggacagcaggtcttgagtcccacatctttctgccggttggaagtctcctgcagcagacacaattgcagtgctgggtgcaacagggaaagtctgcacctctaccccaacaggcaggcagcctgcatgcttgtgaagggtcgtggagaaggggtccttgttctccaccttgtccaccaccatagacacaactggaacttctcccatgcgaattcagcatgaatgtacctacagatagccctcctggaacaattcacggtggctgcatcctcacagaagcactctccaagtttaggcttgcacaagaggcagagtcacaattcctttctatatggaacatcaacatccctcatccctacagatgaaaagaggtgcctgtctgatgtgaatagctgaaacattaggacaggagtgaggctgggaggtgggtaactttcttgctggcctgacaggggaggtggattagttcccaatcttcaccctgataaaactcagtgcatctaactgagagatcccctagccacattaatcaaagctggggcctcagcccaccattgtgtattgtatctaaccacctgctttagctgcaactggtttctatctagggatacttcccctactggcctgaagcctggatcatcaagagagtaaataaaatactggggaaaaattaaacaaataaaaaagtgcctaacacggggaaatgagataagcttcaagagatccttgccattccaattccacaggagacaatgaaattgcccacaccccgagtacaaaactactacaatcagcatctgagaaagtcagcatacaaagactctctataaccaagaaactcatgtagagtcttcacccctaaaagcagcaaaatcaaattaggctataataaactataaacattaaagccacatcttgaagagggggaaaaaagaaattaaaaaaaaaaaaagtcaaatcaagaataaattcaagaacaatttgaagaaacagtctacacaaatgagaaggaaccagaaaatacaggtaatatgataaaacaaggttgaaaagatcacactagcttcctagcaatggatccaaaccaagatgaaatctttgaaataccagataaagcattcagaaggttgattattaagctactcaacgagatcccagagaaaggtgaaaaccaacataaataatttttttccccccgagatggagtcttgctctgtcaccaggctggagtgcagtggtgcgatcgtggctcattgcaacctccgtctcccgggttcaagtgattctcctgcctcagcctcctgagtagctgggactacaggcacctgccaccatgcccagctaattttttgtatttttagtagagataaggtttcaccatgttagccaggatggtctggatctcctgacctcgtgatccacctgccttggcctcccaaagtgctgggattacaggcgtcggccaccacgcccggccaccctgaccagagatagttttgttatggatgatgaagcattacactgagtgaaaaaaaataccctcaaatttgagctctttcttgcttaacctaaaatacccacgctatcacctttatttttccttttcactttctatatgatgtatccgcttggcaaggacgtgcacaccaatatgtttttaagcatcttgcctatttgcttagttaatatgtcagtgaattttaaaaactcctttgtcagagaagtttaagcaattatttttagtactttagaactatcttgggaatgtttcccaaagagtattgtacactgaaagaaaaatggtgccagaatttaaatgtatatttttaggtttttcctttttcaataacctatttatcttctgctatttttaagtgacaactcataataaatggtgaacctattttagggatagccatgttttggggatatactcatgtggatgagtataaattgatgactttaggaaaaaacaagttaattttattataagacatatgaacttacagtagggaacaacgaaatagattaagagttgtttcaattacttaataaaaataatttatcattgtgggggaaaaagtaaagcagacattgcagttgacagtggagctccagaaataaacaattaaatgattaaataaatggagaacaaatcaagaaaacaacatgaaaatgaaccatgtaccatccaccaccaacacaactcaaaacaagagtgttaagtctactccacgtcaaaactttcagagtaaataatgcattttaggaacttggtcattaaatcttaggttcaaattccacctcccttacttctgacttgtacacacccctgggaatatcccttaacctcagtttgctcatctacaaaatgcagctaaaatcaggactgctagattttaagcccttgctcatgactgtcacccccagtcctgtctttttcatcctcatctcaccttccccttcatgtcagcttgaaccttgctccagactctgtagtgctgcaagcatacccctggacctttgtcctccctcacccagccactgcctgctgtgtccttcctccttccactaagggcctcacaaaaggagtctgactcagggatctgactgtcactgcacaggtcacctgctcatgttatctggctggacccaccactctggtgaaagtgctctggcaaaacctaccaccaaacacctagttgggaaatataacagctcctgtttcattctcaccttccctaagctttctgaagcaactagcactgctgacctttctcaacttcttatttgctttcttccttgacttgctagaaatgactctttcttggtcctctttccacttccctgactttgctttcctggtgacattccctcactctgctgtccttaaggatgtttctgcccacaaggttctagtcttgggcctaggtttttaacttgtgaagtccatacaattttcatggatgatctaacacttcacacctacatctctttaatttttttttttttaagatagagtctcactctgtcgctcaagctagagtgcagtggcgctgatcacagcagccttgacctcacagactcaagtggtcctgtgctcaagtgatctgctcgccttggcctcccaaagtgacgggattacaggtgggagccatgatgcttggccttcttctaatttttagtgttgagacaactgaagattcacatgcagttgtaagcagtaatacagagagacctcaaatacctttcatctcagggtaacatcttgcatacctataggacaatatcacagtcaggaagttgacattgataataatccatctatattactcagtgttcaccagttttacatgcatgcatttgtgtgtgtgtgtgtgtttggttctatgcaattttatcatatgtatagacagtatacccacattctactcccattccaaggcccaaagctgggctcttatcattctggggagaggggtgcttaagtaagaaatacagcaggctctaagtcctgacaatccctatatgctctgaaatggactctctgctatgagcagagcaaatctaaaactgtagcaagtaaatttccatctctttttatgatgctctcctaacttggaacaatctatgagctcctttcaacacctgcccaccctgctaagtctggcttaagtccttcttcatggaaagccctcatggtgctaccagtccacagtgagtccttctggacttcactgtgtgttttccattagatgtaaagctccttgaggatagaaaatgagccttttttgtgagttccatggatttgagacatacctgtcttcaataatacaaaaaccatttgaactactaaaatgggaaaacagaggagaaaaaaagaagaaacaaggaaggcagaatttgccatcacagaggactccaggaactaggatttcaacttcaacaactagattaaaaaaaaatagagcaagcatggctaaaggctaaatccttccttttccttcccacaagatttcatacctgaaagaatactcaccctcttcaacagtcagcaggttacccaattctgctgatgaatgatactggactggctcagagctcttcacatttgccagtggcaggaaggggtcataatccgtggatgacaagtcagccagggtcagtatgtagtgactctgttgggtgtacgtgcttgagccacacacacagcagtgcaaaacctgtgaaaacagaggccatgtgcaccacggatgctactcaccgcgtgtcccctgacaatctgtcaaactactgcagcacttggcagctaggactcctgcttggtcctagctggaaatggaatgaccactcttaaatatcttcttgctattagcaaatttattttgctcctttcatatcaatgccaagaaatatgttctcaaggcaaaaggaaagtaaaagttaaaaagtacttattcacattctgtgtgattgcacatacctaagtccccctcctgtccaccaaaggcggcacaggtagaaggaactaatctggggatgaagggtagtggtgggacaggccaatcacggtggagggtggaatgagcacaacaagcagagaccattagtgcacgtcataaccagtaatgagtttaaattagtataactcatgacgccataaattgtaagggctaacttaatacaatttttaaattattcttattttcacaagattagttcctgaaagttcactggttgtttacaaattgcagttgattgaagatctatctactcatttgagcctttgtacacatacaagccatgcaaacacaaatcatcttgaatatgccaaaatgcataaatgaggtaataattgtaacagatttccctttttaatcataaattcaagatcatcaactccaaacactgatttttataagaatcaaggtaatacttgagaaaataagaaaacaccattgggttaaatatatttatgtaaagtaaattcacttttagatgactagctttggtttgctgacatggcaagaggccttgtggtcaggtaccctttgtaaataagtaccaagaattacagttgtcagggcaaccacttgactatgtcctcttcctagcaaaaaatgcagtataggaaaatccttatggcagctctcttattaatttaaaaattaagctgcaatcactgagagaattaatttctagtagccaaaatgcaataaatgtaggaaatgcacattaaaaccacacgttatgtgtaaactagcacaactactttggaaaattatttggtgttcaccaataaggcagaatacatgtattccagcaacttcactcctaggtatacacccaacagaaatgcatacgtatatgtacaaaaaaaaaaaaaaaaccttgaatattcacattttattggtccaaaactctaaactatccaaatgtctatgaacggtaaaatgtataaatacattgtggtttattctatgtaatactatatatcaccaagagtgaaaaatctgcaaatattcacaacggtttgaataaatcactcaaaaataatgttgagcaaaagatgtcagacaaaagaggatatactgtatgactcttgtatagagttcaaaacaggcaaaactactctgctctgttacacaggatagcggctatccctggacatgggtatgggaccagtggctatggggaggcacagagaaggcttccaggatgccaggaatgttctgtttcctgatctggactctgattttacaagcatgctcacttggtaaaaattcaccaggctttcacttacagactgatgcagttttctggaagcatattatacttcaataaaaagtttacttttaaaatacaaaacaaacagttatttagtaaatttatgaatttttactatgaggtgacttttacagtggtaaagcaattttaagagaaatctttaagaaaagaaagaactcagaaaagagatttacaaaagtgattgtggctaatgccgttggcccaaaccaagctctgtacaggtttataaaccacaaaaacaacagaagtatctaatgaatcctaatatagttattaaaatctttgactactgaagaaaccatttaagaatacacaaatactttttagtagaatttcaaccacaattaggtgttttttttttaaagtaatacttttaaaaataaggcaacaaagtaatcagtctgtgacttggactcttttttattattaaaggtttcttactaaaagaataaaccacagaattttccctccatagcagtaattattcagtggacatgcaaatgctaaacaaacaaccaaggtttgagagacactgttaagacaaattacagaaggatattataagcaatccagagcaaatgccacacctagtcatcagtgtgtatgtgtgtagagggaagggatggggggttaactaagaatattttaaatgttataaaaatgatgacgctaattactttgatgtgacatagttccttaatttatttcttaagatttttttgaggcaaaacgattattaagaccattaaacctttttcttcctttgataaacagattttgtcaaactaatgctgtatacaaatagataaaagaaataagacctggtgttctatagattagtagggtggctgtagttaacattaatcaactgtagatttcaaaatagctagaagagaataattccagtgtccctagcataaagaaaagataaacatttaagacagacaacccaattaccctgatttgattacgtgaatgtattaaattatcaaatgtaccctgaaaatatgtacatctaatatgtatcaacaaaaataaattaatcttttaaaaagaagctacttgccctagggaaaaaattaatgtagatatccctataatatgaacagttctttaagtagacatagaacatgttccatgaaaattgaagaattctgacaaaactgcagttgtttaaagattaaagatgatagtcatgtaaaatgcatgcatctttaacttggtaactaaccactgcttctttacatctgttctgctttcagtccttaagttatttacttttttggggggggatggagtctcgctctgttgcccaggttggagtgcagtggcgagatctcggctcactgcaaactctgcctcccaggttcacgccattctcctgcctcagcctccggggtagctgggcctacaggcacccgccaccacgcccggctaattttttgtacttttagtagagatggggtttcaccatgttagccaggatggtctcaatctcctgaccttgtgatctgcccgcctcggcctcccaaagtgctgggattacaggagtgagctaccgtgcccagccaagttatttactttttaagaaaacgtttaagccaccataaatccttttcaaaagggcaatgacaaataagtacatgcataagacatattttggtggttctctgtcatataaacccacactccattcccccaggcccaggtgtagactcaccctgtagatataatccagcaagggggctctggccgaatgctgctcctctaggactgctgtggacacggggtggagaaggacactcacgggcaatgccatgcaccagtccaagaggcagagtagcaaggacacaataaactggaagaagaacatgcccggtagcttatgctgcagtctcttaaacctcactacatgtaataataagagaattatccctacacccagtattcagtggacatgcaggtgctagataagtaggtaagtaaataaataaataaataagtagcattttcacaaaaaagactgttaaggccaatagagaaggatattacaaaggatatcactagttgtaacattatttatcattttaccttacattaaaataaaaaaactataggaaaaacttagttaatgtgccacctaccttcttgtctgtttccactgaggagtactctgcacttggtaaaagaaaagcaactgtggccacgaggatctgcataaaagataaatccccaatcaaacagaccatatttgtaagcctttgtaagcctatgttaggagtcccacgatggccttgcaactaaacccagcttggtgccaactcaccacagaaaggtgataaaaagcagagggccagctgtgtggtgatcttgaaaattagggaaagacaatggggccacatccagtttccactctacttttctggttgaaaaattaggagggaaggcagagaaaagagtatttctctctgcagtcacataattctgaacattggtttccacagttttcatagtgaagtaaaaaaatacttctaaaaataattatgaaaatgctcccattttagttttattgtaaattaccctacatctccacctgctatcctggtgtaaacagcaccccttttattctcaaaagcagtcccatttagatgataaattacatcatcaccccaaaaccctactttccatttcagagcactttatgttcccatgtccaaactccatttcactctaggtcacttaaggtcaaaaatcacttgtgccttttaacgtgtctctgagagaacaaagtgttctttccagtgaaatctgtctagggctgagagaaaataaatgaatatcacttctctctccttgtaatacctcatggggacaaatgaagtttcctcgaagagttaccactggatgtataagaacagggcatgtttttaaagtgcagctacaaaaatcagtagaagtgccttatcccatggacacctacgggagtgaagctgcctgcttgtgtacaggcaaagcacacttggatgcaagtggccttcaggatatgactgtggagaagattcttcctattccttccgcccctctttcctaccagttacccccacaaaggttatcgtggtagcaatctcattacagccggtaatcatgctagggcagaaagtgtggtccagggctttagtctgggagagacttctgttttacacaacagctgcccccctccacccctcacggagggcatcataaccagctgcctactccttgttggcaccatccaaattgctcttgatgaatgaagcccaatctacaaaaggtctctttgttgtggtcgtgcctgcctttcaaactccccaagtataagcctctgtctggaatactgctggcttctttacatagtgcctgaaatcacagctgagaagaaccagtctaacttaatcttaaaacgagtgacttgtggcaatttaatagttggttctctaacaattatttgaatatctataattaattaaatatcaaatacagtaaaaaggaaatgcttatgttttagtattacagaaaaaaagacttacttctgccattttccgaggcagagaggtttcaaacatctgaagcttctcccagtaggaaaccagcaactgaaggacatcgcaagctacctgggccacgattttgttgggaaactataaaaggaaaccgaatcccaaagcagacacataacttaacaggtgtatcgttcttaaggacaaaatagttatttcttctcagttccttatagattacatttatctgttttgcctcaaattgatgaaaaatatgtcctattaccacagagtttagacatcgtcacatcaccattttaaaactgtctcttctctagcctcactgtgttaatttacataacgttctacaggaacaaggagctttcatttactcatttggaaattaaaaccataattcaaatttcttattcagctcacataaatcatatttttgacaactagagaaaattaaaatgtacccccatacactgaaccttttacaaggattttactcattctctcactgataaatcttcactgacagctctgcaaggtagatgttattttcattttacacatggagaaacagggattgatcaaatggctttctatcctatgaaataaaacttgacctacatgtataacatactaagaatgtgtaaaattagagtgtaggagaagataactaatgaattatggtatactcaattattttgagtatgtttcctgaggctggcgtgcatctcaagtcaccaacaagggctggatgcttccattgattgcgaggcagcatgtctaagggcagcaccttcaaggtcttactttttcatgctgggagagcacagaagggacaagggcaccctctgcttccctccctggccagaacatggggctacaccattatccatatctcattatctatagcaggaaaggttcgtcgctgaccctagtctagggacacctcactctaagccacatgaagcagaccatcatcaacttttagtgccccagtgacaaatgtacagaataaggaagaagataagggaaaggtttttaattctacagaataaacagttactgactacccctacctgagaggcactagctaaacccagggttgtagtcgttgcactcaggggctcttcacagccttctctggccacagagacctcacatcccagatgacccaatttccactgaccttgttccatctctcaaacactctggcttgcttctgccccatggcctttgcacctgctccttcccaactttgcttggaacacttaatccccaggtctgcatgtggcttgcattgttatacctttcaaattgtggcacaaaatgtcatctcctccctgaggccaccacaccgccctccccccacacccccaagagctgggtggtggcccaccccctcagctcttcagcttcatcctattcccctattagatctccttcacagcattacaggctatcagcgctgacctttttgtttgttattttcctgcatatattgttcaccactgtatctttaatgcctagcatggcccccttaaggatgtgcgtggtgtgcctaaggtgaagatgaaactctgagagagtgggagaacatgagtgggcactgtgtgtgttgctgatgcaccacagtggcagagtcaccaggtggaaagataaggctggcaaagctctgaactcaagaagctggaaacagacaagggaaaattacgagagcccacagacaagacacaaaagctatgggcagacaggagtgggacatgaggcttgggggaaaacaggcagagagaaggcatcgtggagggagaggagagctaagctgtgcctggagaatgcaggggggatgtggggtctccttccaggtatgggtggcaaggcccaggcaccaaggtaggaaaggtcggtcggatacagggggctgcaggcagggtggtgttactgacatgtaatgaaggaggtggggaatggtggagatgaaataagccattcatttgctctctcacttctccagcatatagtcatagaacaccaacagagtgccatgctgagcgctccagcctgtgggctgcacaggtcagcctgtgcatggacagatccctctgacggtggtatgaacagtaatctgtgggggccagtctaggactggtgactctgatcaggaggctgagtattggcagggtgagtgtgtgagggatggacttgggcagtgggtgggacggacgatgggtattcaatgggcattcaggaagtacagctggcaggactcaaagccagaaacagtggggtaaggagaaggaggaaagtcagtcatgtctcagaagacgaggtgggagaaggagcagggctgggcagttcacaagagttggtgagtatggctgtggcttagaaccacctcccccaaccaccccatgcctgccatccatctgctaccccaccataaacaaaccagccaaccaacaccttgctgagtggaatgctctgcacattcatgggtgcacctaggtcacccttgcagggcatttctgaagggttcttacaagaggggtggtgctggctttatgtggagcccgtaaagcaggaagccctgccagagcttgcactctccgctacccatgaagcaggctgaggctgggctgggggtggggccaaggcccccactgcctcctctttctccatctctccctcctggcagagccccaaagcctcctagagtcccctgttctcatagtggtggttgttctcctcgttccttgtagcaactctttccctcccagtcctcatttcttcgatttatgtgctatgtccttaggtaaaacaacccagttgccacagcaacacggaaactagagggaggcaggagaggagggcagtggggagggaggtgtcctcagagaccaggacttaagtcaatgagtttcctgttattaataatggttaaagacagaacaacttggctgcatcctgatccctctgctttcttagcaattcaagctggagtcagttctttgaccttcctcagtcctcttctcttttgctgctatccagaggggggaggattcaacaggacaatctccatgctgtgctgggatagcggacagagtgagagctcaatatgtggtaactgcattgtttttctggtgtcttatattttcccccataattatagaaaagttgcagaaagaatatctatccctctactctgttatcaatttccatctctttcctatactatatagaaatatatatacagtcatgtacctcctaaatatgttttggaaacatttggtaagcaccacatatacaacactagtcccataagcttatagtgccatatttttactgtacctcttctatgtctagacatgtttactcaagtacttaccattgtgttccaattgaatattcagttcctacagtatttagtacagtagtgtgctgtataggtttataacctcagagcaacaggccatcccacacagtccagaaaccatctaggtttctgtaatattctttatgatgttcacacaacaatgcaatcacctagcgacactcttcttagaatgtatccccatcactatgcgatgcgtgactctgtgtgtctgtgtgtgtctatctccttcaatctaacacaccgagttattcatagtttttccatggaaggagtagagatgggggaaccaccttacattaactatatacatctagatttaagaaaaaataaaaattcaaaaacagatcttggaattgaaaaagggtatttaaaaatgaattggaatctacattgatctataatttatagccaacttgttttcactttaataaattatatgtaaatatttctccatggctttgggagtcaggaggtatcccacacacctcagttgtgtaaaactccacacatgtggccagagtgttctgggtttggctttggcaagctccttcagttcctagtcagttcatctacctcatctgtgaagtggaggtggcactgacatttcccctcacagggcagctctgcggattaaacttgcctacaaaggtcagggctcagcaccctgctgtggctggagggacactcttctgtgatattttggttggataatttttccattcctcatcacagggatcagcagcaagtgtttttccagctcccataatacaaccaccacccccacctccactaggtgttgtggaggagaaataggggaggatgaggcaatgggggtggtcagagggtgtacttggggaacaggaggcattgagtttggtcaagcaggggccagacgccaaatcaaggatgggagacagcactggctggtcatcctatgggcagaagcagataatgcacaaagggtggtacagagactgttgctggcctgatggcgacagtcccaggcgtcagctgtaagtgccgttgctattatagctgcatgtggcagggggcacagaagggcatgcagcagcctgaatgctggtgttaggtggatggttcaggggttgaactttggctcagtgaggtggtcattctagagccttgaacaagttccttaatgatcctgcacctcagttcctccaccagtaaactgaggacgcttacccctgaactaagaacttccacaaaaccctcagcacagcgcctggcagagaccaggcactcactggttccctaagtgtgataatggcaatgctatttattaccaccatttccaagcaggacctaggaaaggatccagcaggatttgagctctggcttagaggcagcctaacagcacctgtgaaagttcaagcatgtctttaacaccacacagatctgcttttattgctggttccatcacttatacctgtgtggcctcgggcttgtgacctaatttctctgggccttgatttcctctggtataaaacagaaattgcaacatctatcttgcagagctgtcttgaagattaacagaattatttagagttcgccattactctgacctagtgtgagtgcccagtgaatggcagttcttcttctcattaacaaaacaaagaaacaaagatgtccttaaagtgcccaagattcagccagatggtgaacactgagaggcctaactggaaggtgtggaggcctctcccaggcctgctgaagaggccagagcacgacaccccactctcttgtcacccccaccaacaggtgacaggtgacctctttgcgacaggagcttcccagccaccagaggaacccatttggccactggtccaggaagactcgagacactcgtggccaggctgcagctgccagcaggggagcatccgttggtgcccctcccgggagcctcacagcacatgcaatgggaatcacaatccctctgtcatttgggggataaaaaagatggggctaattcaaactcaaactgttaaatgcctcagatatggcttaatatccaatcagcaccacaaactggtaataccttcagagttactcctatcacattgatggcctctttcacctgagggtggcttgtacactgtgcaagctcttcacatatccagaccccaagggagcaaacagcaatgcatctttttaaaaagaagaaaacagaggaaaactctcatgaaacttaatatactttctcagtattttcaaataacaaaacactttaaatctatttatacaaaatagcaaatattatagatctattagcagaatgttttcttgaaagaaaagataaagaaccctcaataggccaattttcaggacaaatagaaatattgataatggtttagtacttaaatatttaattaaacaaatggcatattttctattaattgtcacagcccatatatatcacttagttttgttgaaactaataggttattacatttgactgtttcaagatatttttgaggaagaataagaaacataaatctgagaaaactgtcaaaaattgtgtttgtaattgttttctttaccataatatgcacaatacctataccacaaacataaaacaaatgctatattttattttaaagtatatttaaatacaactttcaaaataaatttcactgttaattcttctcaacagtgtgctaggaccagatattcttcacagaaagccgaccatgccatatacatttctattctgtttttaactacacagaaatttggctttctacactaaagaaagagagaggaagaagaattgccaagacttgatggtttagatgcagtaggtgtaggaaaaagaagaaatcaagggttttctctaaatttctgaactgaaaacctgggggaatggtggggccatgtggtgagatgaaatctgaggaacagtcagctcggggggtcagaaggagactcaagggctcagttatggttgtgttaaaacattcaagttgagatgtcaagtaggccgtttaatatataagtctgaatataaaaggggttcactgaagaggcaggtaaataaatgagcaagaagatggtatttaaaggctgatcagaataagagtgcccaggaagtcatagagagaataggcccagccctaagccctgcgtcactctaacattcatcagagattaggtagaggaggagaggtcagcaaaagggacagaaaggagaaagttcagtgaggcaggagcaaaattagggaattatgttctgaggaacatgcactattcaggaaaagagtaacgagagactagctgcaggcttggtaagtatgcatgttcaaatacctagtagaacctctaaaagaaggaaagggagcctatgatttaaaaacaactgagataataaatagaatggaaaaaaaatccaaaaaaaaaagaagaaagaaagaaagaaaaatgggatggggaaatgaaggcaagataaaggagaaataaaagaaatattataccttatttttaataggatctttctttcctattaaaaataaagtataacatatgataagagaagtacatccaaacagatcagtaattataacaaacgaaaatgaatctaaagcttcagttaaaaaataaaggtgggatgggataaaattacaaaatctggatatatacagtttttgcatagacatctaaaagaagactataaaaaggttaattaaaaagaatagaaagtattatttaactaaaccagtggtctttaagataaaaaaaaatcctccttagaaataaagagtcactacaaacatgtaaaatatttgattcactatataggacaattctaaacttttacgcaactaatcacatagcctcaaaatatataaagcaaaatttgacagtatataaggagaaatacataaacacaccataatagcaggagattttaacatttttcttccagaaggtgatcaagctgatgaaaaaaatcagacaggatacagaatatttgaagcccagtagtaaaaaaatttaataaacacaattagaagactatgcccaacaaagaactgggcattcatttttttcaggtttatatgggatactgacaaaaactgactacctagtgggtcattaagcaaatttcaacaatttcaaagactgctgtaagacattttgatccacaatgcaattaagtaagacatcagtaaaaaaagatacctatagaattcagacaaagtagtaactagcaataaaaatatagtcttaaatgtttatatctgtgcaggagaaattaatatactaaatatataaccttaaaggtaagattgtaaagaaagtaaaaggaaggatagaaaagagcagacagtggcaaataaaagcaaatataaaatagagaagttgaacaaagacaaaagcctagtctttgaaaagactaataaaattgacaaatttttggcaagactaattaaaaaatcagaggatacacaaaacgtgtcagagattaaaaagtggatgtaaccatagaagtgaaagagataaaagataatagagatggctgggcgcagtagctcatgcctgtaatcccagcactttgggaggctgaggcaggcagatcacgaagtcaggagattgagaccatcctggctaacacggtgaaatcccgtctctactaaaaatacaaaaaaattagccgggcatggtggcaggcgcctgtagtcccagctactcgggaggctgaggcaggagaatggcgtgaacccgggaggtggagtttgcagtgagccgagattgtgccactgcactccagcctgggcgatagagcaagaccccatctcaaaaaaaaaaaaagataatagagataactcatagctcatataccagtatattttaaaatttaggtgaaacaggcaaattcctagaaaagtttggtttatcagtactgtcaaaaaaaaaaaagtagaagaagaagaaaaccttaatagtcctaaaatcactgaagagaatgagtcagtggttaatcttctcatcaagaaaatattagacctaggtagttttaccatcaaggtctactaaatactcaagaatattaactctaattttgtaaaaactctttctgattaaagaaaatgaaatagtacttattttgtgagactttataaaattataatcaaacctgataagggaaggatggggaaggaaaattataggccatcaatataaaagcaactttcctgaacaaagtattagccaaaccaagtctggtatcacataaaccaagttgaggttatccaaaaacgcaatgttagcttaatatttgcaaattattatcagtttagcttctggtaaaagcagactaggaaatttgaactaacccatctactgaagataaccaaagaaattagacaaaatacaagagaaaaaacacttaaaatcatcaaatagctggtaaggcagtgatgaatgatgggctgctgtcttggaatgaggctacagagggagcagaacatgaaccgttcctaggagggagtaagaggctgagctgggcttctggtgatcttatggggtttgaaattgaggatcagagacaggtgttcccctccattagcattcccagctttggtcttcacgttgggaggagaggcagaaacttttcaatacgtaagtggcccagaaaacctcatatatcttgatcataggttgctagcaacctcagatgcctggcagaagcagccagaatatttccagacactgccaaatgtctcctggtgtaaaagatcatcactggttgagagtcactaccctacacatacaccatttctataaatatttggtttatattttcattttctttcttcttgaaaatatcagaggatacatgattatatttgtaatcttgctttttctcacacaaaatagtgtactatatactcttctgcactttacaatttttacttaataatgacatctttttaaataatcatgcaaagcatcttcctggcatcattcttcctagacttttcagtctgtataagagctatgtgaaagaataagtgttttcttttgtaacattaactacttacacataaatgtgtatcttaaaattctaaaatagtttacctcttattcaacatttaccttgcatattcatttggttcttctgtggcattcttcagtaaaatatttatgaggtaatgctaaaaacacaaaattaagtaaaataaaaactttgtgtcatagttggtttcccacatgttctgaccatgttccaggcagccaggagctactgaagttcgaccagggagctcagagagctcatctatgagtgagagcctggggggaagaagaacactgggctcgggggagcgggtggtagaagatgggggtctccacagggcctccttaggccattcagcccgcgggagtagagcgcttctggtataaagcaaatcagacttccagataggaaaatctcggttttcttttacttcaattgaattatatgttgtacactgaattatatactgtaattatgttttatagtttgattgattctgggattctaaaagcatttttgtttacctcaaagtcagctgaggagagaacaaatgcttacttttattctccaataaataatttagaatctcaaagtattagcagtatttaatcaggccaacaaggggattgaatatttagcttatttccattatttcttataaattaacttgatgcactaatgcagttagttaagctaataaaattattacaaagggcaattcactacatgattatgatccttaggtccaataaacaggtataataaaaaacacctgctatagctacagctataaggtctaactgcaatatactctgaatttaacacatgcatagcccatgaatagtcttctagaaacaactactgaaacatttaaaagatacagcaaaacttcaggaataagcagattaatatacactaatggaagagataatcatacatctagaattataaaaagtactaaacttgagatacagtcaaatgcgttatgtaccttgacatcttcagttcctgtaatggcctcatttacttctggcactgactgcagtaaaggaatctcctggtaggtatttggaaagcagaccagagagccgaggacagtgacagcctctgaacgaggcgcctgcacataaggaagaggagcacacacatttctctttttgtaagttagaaacgttaaataagtgacatgttttactcttcatcctagataaaaaataccaaacttggccgagttattctcttccaagtgcatatttaagcaaaagaggtttgcctaaatgaaaaagcaaatttctaagtaatggaaaatatcactgtacttggatgtaaacaagtgttgtggaaactgatctgcagattcattcagaattagaaaggccaatgactctgtcatgactgtttacattgttttactgctaatgttctcaacaaagcagggtaaaggatatcaactgaataccattttgctgttaagaacaattaaggaaaattcatagggaagtagagatggaggtaactatcggagagtagaaagagaagacaaactatcaaatttcccatctactgccaagaactgctttacgaaaaaatataatgagatactatatcactatatctagtgagatacttttatttgcccagtgttaggattaggtatatattttaaaaggcatggctgggtgcggtggctcacacctgtaatcccagcactttgggaggctgaggcgggtggatcacctgaagtcaggagttcgagaccagcctggccaacatggtgaaacctcttttctactaagcatataaaaattagccaggcatggtggtgggcacctgtaatcccagctactcaggaggctgaggcaggagcattgcttgaacccaggagatggaggttgcaggtagccaacacagtgccactgcactccagcctaggcaacagagtgagactccatctcaaaaaaaaaaaaaaaaaaaaaggcatttcactagatttcaactcagccaacactagcagatatggttagccaagaataggggactacacaggtctgtcatcaatctactcacctatctgtccatctatatgtctactattatgtaataaaacaatgaaagctcacatttaaggagttctcactctgtgctaggcactcttctaagtgctgtacaagcatttcttcataaagtcccctcaccaacccaatgaagaagaggctactgttttcattttccagtgagaaaactgacgccaaagaagttaagcagcttttcagtgtcatatggctcctaagtgatgcaccctggatttgaactgaggccatctagctccaggtccagactgagcctacagttaagcacttgggctataaaatcaaagagagcttttctccctcagagagatgaggcgcagtatgtgaggtaggtgaggagaggcaaataacagctacacacaattcagtgaagcacctgctaggagagcaacatactgaggatagcatgggagcccagtccttcatttttttacctagcttggttcccataagtacacaggtaaataaaaggcaatataaagcacagcagagctattccatgggatgaggcaaggattggttctgctcaggatgtttaggaaacctaaaacaaactactgctaagggccacagaggagagtagaaatcaggcaggctggcggtgggtgagggagccagttgagtagggaagaggaaggtgtccatgagatgggaggctgaaagggtcagaagcagtcgttcccaaagtatgttccactagggccacagggactgtgaaagggcaaaatcaaagactcccgggaaaaagacgttgcagagacatttggctaagcacaattaaacaaaagcctttaacatgttattgtacactgtgaatttccaagtgaagaagtgtatttcccaaaattatttgactatgaacctggctttcttccttccctttcccccaaagtatctggggagattactgttctgaagaagactttttgaaatgcttgtcctgaggttaggagagaaaagtctgggataacaattcacatgtgttcagaggaactgaatgcatgcgtctttgtggagtgcagagagagagaagtgatgacagaggtaggagccctgaggacgaagagacagacaacaggaagaatatcattaccaacccacagaagtcctctttgtgcccctcccatgatagcctcccctcctgcaaagtaaccgtattctgctgtaacaccacagattggttttgtctggtttttcaattaaataaatgaaattagagtatatgttcttttgtgtctgacttctttcactcattatgttatgtaaccgatcctgtgttttcattgtatataataatccatcttatgtacacactataatttaactgttctactgctgatgggcatttggattggctctaggctttggctgttacaaataatgttgctgtgcacaagcttctcctcatctcttggtgacttgtgcgagccatctgtgcatcttcctcccccactgcctcagtggggcagtcctacctagcaggggtacttcaaactggtaattaccttgtgctaactgaaaattctgactgagcaggtgtgctccagcccaaacacctttcaccagttcctctacaattttaacctcaagtttaaacaagaaagtactatcattcagagtgtgattccttcatgtaactcttacacattctcattcatattctctctctttttaaaaaaacattttggaaggctactttattaattttgtgttgattcttttttcaactttactaaagcataattaataaaaatttgtatatttaaagtatatacaacatgttttgatacacaaatacattataaaatgattaccacaaacaagtgaattaatatatcacctcatatagttcctttatgcgtgagttgtgaacacttgagatctactctcttagcaaatttcaagtttataatatagtattattaattatagtgaccatgctgacatctcccgaactcattcattcggcataactgaaacttttgatccactgacaaacatcatcccatctccccctaccccaaccacagcccctgggaaccaccattctacaatctgcttctaggagttggacttttttagattccacatataagtgacaccacacagtatttatctttctgagcttggcttctttcatttggaaaaatggttcattcatgttgttgcaaatgacagaatttccttcattttttaaaggctgaataacactccactggagatatgtaccacatttcctttatccattcatctgtcaatagacatttaagttgctttcatatcctggctattgtgaatgctgctgcactgaacatgggagtgcagatatttcttcaacatactgatttcagttcctttggatatatacccagaagtgggattgctgggtcatatggtagttctatttttaactttttgagaaacctccatactgttttccataatggctgcagcaatttaccttcccaccaaaagtgtagtacacggggatgaagatgtgtaggaaaaatggtatgactagcacacccagtacccaaccattcactaacccacacactcatgtgcaatatttgaaaacagaattaaaaatcgattcatggctgtaacatttattcctactatcatacctcaggcagatagttaaatgtatataacattacataacattgatatatgtgctaaagaccaagcaaattcgataccgtcagaaagcttaaaagataaggcactcatgtctcttttactgtagtttcaaagaacataacacttttttctttattgcaagctggttttgtatttcatcctttctgaattttttgaagtttatatttcaatacttccttccctccacattttctagtttgtgtttttccaggttctggttatgctttcattatttattttcccatcttggcaacacttcatgtgaatttgacctttacatttacctttataccatctttgatttgagtagtctctattgtgttgattctttttttccagctttactaaagtataattaataaaaatttatatatttaaagtatatacaacataatgttttgatatacatactgttttaatatacatattgatccttatcaatatgtttttaacctatgtctttggggatgtgttggttgtgatgtcaaatctcattctagttttttctgtcagaggcctcaaataaggaagaatcactattttggtaattggtgatcacagagggaatggaataataaatgggcattatatatcgcaatctaggcaatatataatgaattcaaataaaagtcaggagaattttttttttttttttttacgtatacaagagttctctttcctccacatccttgcctacacgtatcttttgtctttttggtgaaagccatcctaacaggtgtgaggtaattatctcactgtgatcttaatttgcatttccctggtgatcctgagcatttttcatacatagcagttccctcttatttaaaggggatacattccaagaccccctcagtggatgactgaaactgtggatagtaccaaaccctatatacactatggtttttgcaatacatacatacctatgaaaaaattttaatttataaattaggcagagtaagagattagcaataactgctaataatgaaatagaacaattataacaatatgacattcttgtgctttggggctattatgtaaaataaagattacctgaacacaagcactgtgatatcacaacagtccacctaataacagatatggccactaagtgactaatggctgggtagcagataccacgtggatccactggacaaagcaatgatccatgtcccgggcaggatgggccaggacagctcaaggtttcatcatgctactcagaatggggtgcaatgtaaagctctgatttctagaatcttccatttaatatttttggaccaccactgactgtggtaactgatatcagaaagtgaaactgaggataaagtggggctactgtactattagccaactgtatatctgtaaggctactttaatagcccacctagccacactgacagaaaatgaccaccatgtgtgatattatctctaggaagggctccaacatttttacaggaaactctcttggtaaataatgaacatagtattggaagttctggccagggcaatcgggcaagataaagaaataaagggtattcaaataggaagtcaaattatctgtttgcagatgacatgattgtatatttagaaaacctgatcttatcagcccaaaaactctttaagctggtaagacacttcagcaaagtctcaggatacaaaatcaatgtgcaaaaatcacaagcattcctatacaccaataatagacaagcagggagccaaatcgtgagtgaactcccattcacaactgctacgaagagaataaaatacctagggatacaacttacaagggatgtgaaggacctcttcaagggtaactacaaaccactgctcaaggaaataagagaggacacaaacaaatggaaaaacattccatgctcatggataggaagaatcaatatcatgaaaatggccatactgcccaaagtaatttatagattcaatgctattcccgtcaagctaccattgactttcctcacagaattagaaaagactactttaaatttcatatggaaccaaaaaagagcccatatagccaagacaatcctaagcaaaaagaacaaagctggaggcatcacgatacctgacttcaaactctactacaaggatatagtaaccaaaacagcatggtactggtaccaaaacagacacatagaccaatggaacaaaacagaggcctcagaaataacatcacacatcaacaaccatctgatctttgacaaatctgacaaaaacaagcaatggggaaaggattccctatttagtaaatggtgatgtgaaaactggctagccatatgcagaaaactgaaactggaccccttctttacaccttatacaaaaattaactcaagacatattaaagatttaaacataagacctaaaaccataaaaaccctagaaaaaaacctaggcaacaccattcaggacataggcatgggcaaaaacttcatgacctaaacaccaaaagcaatggcaacaaaagccaaaattgacaaatgggatctaattaaactaaagagtttctgcacaccaaaagaaactatcattggagtgaacaggcaacctacagaaagggagaaaaattttgcaatctaaccatcaaagggctaatatccagaatctacaaggaacttaaaccattttttttttttagacggagtcatgctctgtcacccaggctagagtgcagtggtgcgatcttgacttgctgcaatctccgcctcccaggttcaagcgattctcctgcctcagcctcctgagtagctgggactacaggcatgtgccaccacacccagctagtttttttttatttttattagaggcggggtttcactgtgctaaccaggatggtctcgatctcttgacctgatgatctgtctgccccggcctcctaaagtgtcgggattacaggcgtgagctaccaagcccggcaggaacttaaacaaatttataagaaaaaaccactgggtatatacccaaaggattataaatcatgctgctataaagacacatgcacacgtgtgtttatagcggcactattcacaatagcaaagacttggaaccaacccaaatgcctatcaatgacagactggattaagaaaatgtggcacatatacaccatggaatactatgcagccataaaaaaggatgagttcatgtcctttgtaggaacatggatgaagctggaaaccatcattctcagcaaactatcgcaaggacaaaaaaccaaacactgcatgttctcactcataggtgagaactgaacaatgagaacacttggacacaggaaggggaacatcacacaccacggcctgtcgtggggcggggggagcggggagggatagcattaggagatatatctaatgtaaatgacgagttaatgggtgcagcacaccaacatgacacatgtatacatatgtaacaaacctgcacattatgcacatgtaccctagaacttaaagtataataataaaaataaaataaaattaaaaataaattaaaaaataaaactgtatatggtaaaaaaaagaaaaaacaaacaaacaaacaaccccatatgaaagtgggtgaaggttataaacagatacttctcaaaagaagacttatgtggccaacaaacatatgaaaaaaagctcatcatcactggtcattagagaaatgcaaatcaaaaccacaatgagataccacctcacaccagttagaatcattaaaaagtcaggaaacaataggccgggcacggtggctcacacctgtaatcccagcactttgggaggcccaggcaagaggatcacgagatcaggagattgagaccatcctggctaacacggtgaaactccatctctactaaaaacataaaaaaaatagctgggcatggtggcgggtgcctgtagtcccagctactgggtgacagagcaagactctgtctcaaaaaaaaaaaaaaaagtcaggaaacaacagatgctggagaggatgtggagaaataggaatgcttttacactgttggtgggagtgtaaattagttcaaccgttgtggaagacagggtggcgattcctcaaggatctagaactagaaataccatttgacccagcaatcccattcattactgggaatatacccaaaggattataaatcatgctgctataaagacacatgcacatgtatgtttattgcagcactatttaccatagcaaagacttggaaccaacccaaatgcccatcaataatagactagataaagaaaatgtggcatatatataccatggaatactgtgcagccacaaaaaagagtaagttcgtgtcctttgcagggatatggatgaagctggaaaccatcattctcagcagactaacacagaaacagaaaaccaaacactgcatattctcactcataagtgggagctgaacaatgagaacatatggacacagcgaggggaatatcacatactggggcctgtcagggggtggggggcaaggggagggatagcattaggagaaatacctaatgtaggtgacaggttgatgggtgcagcaaaccaccatggcacatgtatacctatgtaacaaacttgcacgttctacacatgtatcccagaacttaagtataatttaaaaaaatgagtatttcaataaagaagtatgatttcccttcttgtatcttgtaatttttttgaaagatgatgtgaatggttaaaatacatttgaaaattctttgagattatcctaaattttttcagaaataatgaagtatgaaaagttgtcataattatttacgataaagccacagttgaacaaattcaacatttttcttcttctacttttttttttctttttaagagatggggtcttgttatgctgcccaggctgaactcaaactcctgatctcaagtgattctcccaccttggcttcctgagtctcctatagctgtgactatacatacgccaccatgcctggcctcttcttctcttttacctttcttctcttttgctcctgtctcttttcacttctctttgttttctaatttatctttataagaaaaagttagtgtgtgaaagcgccaacatgaaataccagctacaggaagtattttaaacaatttaatttaaaaccaagggcttgaagtttgaatttaccctgcaaagaagaaataagtgaaaaagtaatctcatatcaaacaagatttaggttgttggatggcaacactgatttcgacaccaatgcttagcaaatagtaaagctaattttatttataccatttgaaggggcaaagataactctgaatatataacagcttatagagcacaaatggaaaaggccctttaactttaaatgtataacagtattctctcaaaaaggcattaagatattgctttggccatgtgcagtggctcacacctgtaatcctaacattttggaggctgaggcaggaggatcatttaaggctaggagtttgagaccaatctgggcaacatggagggactccaatctctacaaaaaatttaaaaatcagccaggcataatggcgtgtacctgcagtcctaactactcaggaggctgaggtgggaggatcacttgagctcaggagtttgaggttacagtgagctaggcatgacagcaccagtgcgcttcagcctgggcagagaatgaatgggaccctatctcttgaaaaacaacaacaaaaaaagaaaagaaaagatactgccttagtagtagaggtaaatgtagagagtaaaaataatttttttgtagcccttactgatcatttagtccacttctaattttttattacaaaaattctgccaaagtattctggcatgttattaagagaatacatatttacttctagttaagactttactgttctaacattttaagaaaatattttctatgagacttataataaccaagacttaatttaaaaacaaaaaaaaacttactgctaatgtacattttaaaactctctattttagacatttatgtctgtgtcaccatttactggaaaatgctaataatattctaagagacaagtcctgcttctgactgtgtaaatgtgctgaaatattagtgaggatatgatttctcacactttggccttttgatgaaacgcctttccaaaaccagtgtgtcatcttatcctacaatttcacacatcagctgccagggtatctaccctgagagcccagtttcacattgcactaatgagtcaacacctgttaagagtggagaaatctgaaccttgttagcgattgtgaagcctcttgggagctgggatgctgagcattgtcatactcaccgtcaaaatgtctgtgctaaggaccctggcagcggccgtgatgaagtcccccaccagcattgagaagccaggaaaacccagggagaaaaagcggggtggacagtgccttatgatcgtatttaagatatcctaaaagggaagataagaaaaaacacaatcgtaatgttcaaacacaaaattccaaagtagtgtttgtagtggtacatatgaccactgtataataatccaagagagcacagattacagaaaattttcagtgaaagggatattggaaacagagttactccaaggattactgtacccattttaaaggtaagattggagaccccaagctgtaagatgaattatccaaaatctaaatcatggctctgagactagacatttcatctgtcttccgtgtaaaggtaggctccttggacaagctacaggagtaatgaggtaaatatgtaattaaaaccttcaaatatctatcactaaaacaaatgtcctgtctttagctttcaattggccacagttaaagcacagttacattaaaatatcttaaagtaggcaaagacatggaaaatttcactcttcagatagttttacgtgttcagaaatgggaatatgcagagtgctaaggtgacgttgtaatcagtgaaatgctaaggtcagggaaacagcatggctctgagtatatgtgtgatctcagtgcaagtacaaagtgcaacagtagccttttgcacagagtgcagtgtgaagagcatcatctgccccagacatcttgtgttcctgtgtgtgtaatggcctctcattgatggctggatggcccctcaccccccagctctggtctgaagcagatatctaattcttgcctgtggcagatcaggggtccaccactggacagcattcatgccatccatggccaggccacatctctgaagccatctgtgcaagcgtgtttgtgtgtgtgtgtgtgtaacaggaattagtaagaaaaccacaaaccacaaacttatgcagctgttggccatgtacattaatcaaaacacacactgaagtacagtcgtgtcgctttatgatgaggatacattctaagaaatgtgctgttaggcaatctatgatcatcttgtgaacatcatagagtgacttacacaaacctagatggtagatgcctactacacatccaggatacaaatgtgcacaacatgttactataccgaatagtgtaggcaattgtaacacaatggaaattgtctgcatatcaaaccacatctagcacagaaaaggttcagtaaaaacacagcactataatcttataggaccaccatcatatatgtggtctgccactgactgaaatgttacatgactatactatagtaacgtgacttatagttatacaacctattatagtctcaatataagagtaagaagcaaaatctccacacacacacacacacacacacacaaaatcctagtttcttttcttagatttcagtatggttatctaaaaaatccttaaaaataatcctgatttaattctatcagtatcacattagagcaaagcagtagtaacatgctaaattctaacatgttcagtctgtcataataaaaattacctcatttaacaacttatcttcctaaaaaactttgtatgtgttcacaaaccatttttcctaagacttttttttctttacatgggtcttagtttctacaaatcttgatatttacattcttaaaattactgtataatgcttaattcagtagagttcacatatggtaaatagtttagcaagtactaatttaaagttttagcatttcagcagacttttttcctacatcagaaataaacagataaatagataagtgaaaaaggaaggaaggaagaaaaaaaaacatgaaccatgcttcttccaggttaatgtttaagcctgctttaatcacgtcctttgatacactttaaggtccatatcagtcaaggcaaacattctaagggaccgagcagatggatgctgcagtttagaaagtgtgtggtaaactcaggatccaagagtggaacaaaagatccacctttttcataattaagcctctgattaatgccctaggctcctcagcacacacctgtaattactcacagaggtactcattgtgctgggacttgtctcggaatatcaggcatcaagctatccggcagcagatggaagcacatttctgttgacatatgttgcaatgaaaggattcgtgcaaacctggctagcaaggtagcagaatgccatgcatttgaagattaataatgcaaacaaccatgatgttaactttgttatgcttgtgttaattccatctgttgagatgtggaactaaaccttgaagcttgtgggctttaaaaatctttagcacatacttgaatcaaataagccccttttcaccactggaatttagagttttaattaaaaaatgcttttctaggctaaatttatgggaattatgaactaaatcctttaacaagctaataccacaatttgtaaatgaatccattttgcattgtaagatttgtatgtgtaaaggcaacaatctgtaaaatggggcattcaaaaaatatgactaagttgctatactgatgctaaagacagcagataggcatgtagctgagataaagtcacatggctccctcaccccctggacctcagccaatcacttcaacggaacctgctactatgagcaagaaggttggaaagagagggcaaaataacagatggctagcctaccctaccctgccacccacgtaagacagcgccctgaggagacacagcgcctgtgtgaagtcgccaaagacagcactgggggagggtaaatgggggggttaaagagggaactatatgaccagtcagccaaattatggccatatgcctgcttccgttgcttctccacactgaagtggaacaactcgaagactgtatctttgtgataacattttaaaattaggaataaccacgtggtactcaaagaagagccgctgcatattctcaatagtgggacatccacaaaatgccccactcatttctaactcagtagaatccttctttcaccatccccaccatacattaagacacagctataacagaagtctttgaaaaatataataaaaatctgaaaccttcctcacagcctccagggctttatatatacatgggaaagaatgatgctctcagacatgagtcattcatgtgcaatcctcatgccttttgccatctccctgtccaaagtgaacattacttgcctaacaggtttttcaaagtgactcatgttttaatttttttatttccataggtttttggggaacaggcgctatttggtcagatgagtaagttctttagtggtgatttgtgagattttgatgcacccatcacccaagcagtaagcactatacccaatttgtagtcttttatccctcatccccttccaccctttcccccaagtccccaaagtccactgtattattcttatgcctctgcgtactcagaacttagctcccacttatgagtgagaacatacaatgtttggttttccattcccgagttacttcgcttagaataatggcccaattattctgaaaaatttatgtgtatcctttctcataagtaaaaagtaactcaagtaatacaatgacagtaatcaatgctgctaaatttttgctaaaaataccatcctctgatgaagactctgggtctgagagcagctctccttgttgaatataagcacagaatgcaatgtcagggtggtgtgaaagaataacttctctcaactccagctggcctacctaacagtatcacaaggacctgcagagaggaggaaaggggccatcctttctactgtgtgattcaatgctattcagcgctgcctccactgagatggctagtgagaaacggccctgcactctgacgtggtgaaaagaactctagaacttgagccatgaggcctaggtccaaagccttgtgtgactgtgggcagatcatgtcatacccagagcttcatgcttctcttccgtaaaatgaaatgatactcccttacggagctgtatgtaatgggataggagataagaacatatgcctttgtaaaatgaaaagagccataaagaagtaagtagaatagcaagtaaataattatttttcaaaaagagaaggactctgaagagttttactttgtaaaatttactttataggtgtagtttgtataattcagtgaactattattttgctgatctacagaaagaatagtttaagacatttcaaaggtggcacacaaacaagcctcttagatcgcacattaccccagaaattcaaaagctctagaaattagtgctttcaagcaacacccttaacaaagctttacggcaattagccatagtgttttacaaggcaaatactgaaagaaaaacaggaaaattatcattttagattttctaggattcatttttctaaggagttctagaacttaatacaaagaagttcaagttagttttatagcaagaattagtttctttttcacacgttaaatagactaaaccacaaactaaacaataggctcaatgatatatggaatctaaaataaaatgaggtttattcttgagagttgaacatatgacacgtagacaaagatctttcacaagcttttgttcaaagaaattaaaattcatcctgcaaaatgttgcaatatagtgaacagatcaccaaactagtatttttctcttgctctggttaaaagtccaagtgaatactatacactgagtgtgaaaagatcactaagatgataattgtgaatctgtagcttatcaaaagattctggttatgagaaagtaactggtgagaacatctgtctcttatcactgatcttgcaaaaaatcaggtaattcaaatagaggcgtgttgtttcctctcctccaaagcacagttctataaacacaaaccatattcagcctggtaaatgaatcgctttaattgaatgctatgtacacagtaactggaaaaaccataagtgataagaaaaacatatggtgatggcaacagaaattggtttattcattttgcatagtgttgtttctttcgttcccttataattgacctttagagcgataaatgtgtaaaataattttgtttattatggctccaaaccttccaacaattacacaaaatgaaaatttaaaaggaaggattcgttctggaagcatttccattgtttacataattgcacagctataatttagtgctcatgttgttatggaaaataaaaaagggcgattacaggccatttcaattcaaaatattgcacagtggtgtcaaaatgggggaaaatgttcactttaaagcagtttaaaatggtttaaccctaaaaacaaaaacatttcaacatagcattctataaaacacaaatgttcaagaagtagccatcctccaaaccatattagaaatgttgcaactgtactttcacaccaattacatatatattattcacttaatatttgctcagggcccagcagatgatggttgtaacacaatagccagccatctgtctccctgcctttccttcgtggacttgcgcctgcttctcaagagcaaacagatccagttattccacctaaagtcactccgtccctccacgaggccagacacaatcatcaagaaataaaatctgcatatgaaaaatcactcaattcctcatttaactttttacttaaagaaaactaaacactacacagttagatgaattcatcactgttttttagagaagatgcctgtcttttacctaggaaattctataggaagctcttttatttggtaaagaggggaaggttgggatctgtttatcccagtaatctggctaacaaaaagatatgattcattctatacttggataattaattataaaaaatgtgaatgcagaggaatacattcatactatatatgaatataatttaaactttaacaatggagaagacagccacgatcctgcagtacttgtggacatatttttaagtattagttattgcccacctgctgaagttcagaaatgctgagtgacgagaaatttttagttaccagaagaccagatttgaagagacctcaaagctccaaggcctgattctctcatttctgctagtgggtctctgctccttcagcttagggcacaaggacatactttacatactacaagctgctacctggcttctgatgattaaaaaataaatcaaatcaacacggccctttaaaaacaaaacaaaacaaaacaaaacaaaacaaaaaacacagcagagcacggcgccaatacttcatttccagaaaagtcactgagaataagacagcaggacaaagctgaaaattactttcatgactggggccaaatatgtggtatgtgctttacattatgtgttaaaatggttaacttggtacatctgtctgggaaaaaagcagagattttaacaagtgttgtacacaatgtgacttcttagagtacaactatgttatgaaagccaggagaaatattacaggacagagtaattgggttctgcacctggagaatcaaaattgcctagtggcagggcatggtggctcatacctataattctagcactttaggaagccaaggcgggaggatcacttgagcccaggagttcaaaaccagcctgggtgacatatcaagacgctgcctctacaaaaaataaaaaaattagccaggtgtggtggtacactcctgtggtcctggctacttgggaagatgagatgggaggatcgcttgagcctgggacatcaaggctgcaatgagctgtaattgtaagactgcattccagcccaggcaacagagagcgaatctatcttaaaaaaaaacaaaacaaaacaaaacacaatacctagaacttctcaccagcagaactgccatgaagaagacactgaatgtccttgacagcagcatgctttagggaatgggaaacatgcaacaaactcctgaggccacaggagctgttctgagcatttgcacagcatcaagatttcaggagtgacagaacaagtggacagatggcagaaaaaggcactgtgatgctcaagcccaaaaggagaaccttgaatattttttataactgcttatctacaaagaaaaacttggctggcctttaaacagatgaagatggactgttctgcttcagaaaatgtggtatatagatttacttatttaaggaacaatgtacatgaattttattttataatgaagttgataactcactaatctgtctaaactgcctccttctcttggtaacagcttcaagatatatattcatatataatgaaattcaccctataaagtgtacaattcagtagtttttagtgtattcacagaattgtgcaaccgtagccactatttaatttgggagcattttcattacctcaaaatgaagcctataccaaaatgaagcaactatttcccatttctcatatacccagtaactggcaactactagtctactttctgtctccatgaatctgcctaccctggatatttcagcatatggaatcttactatatatatggcattttgtgtatggtttcttttacttaacatgttttcaaggttcatccacgttgtggcacataatactttattccttcttagttaataatacttaattccttcaaattaatattccattgtattgatacatgatgttttgttcgtcttttcatcagttgatgggcatttaagctgtttctaccttttggtgactggttttgatatgaatttctctggtgaataatgatgctgagtatcttttcatgttcttcttggccatttttatatcttctctggagaagtttaagtctatgtctttcacccattttttatttgggctgtctttttgttgctaagttataagacttctttaattttttaaattttcatttctttgtttatttttgagactaggttataaggctggctaattttcatatttttggtagaggtggggtttcaccatgttgtccaggcaggtctcaaatccctggcctcaagcaatccacctgtatcagcctccaaacgtgttgggataacaggcatgagccaccgtgcctggctgtgtaagacttctttatatattctagatactaggccctaatcagatatataatttcaaatattttgtgagttgtattttcacttgcttgatagcatcttttgaagcacaaaagattttaattttgatgaatgataatttatccatttttcttctgttgcttgcatatttggtttcatatctaaaagtttattggcaaattcaaggtcatggagacttagtcctttcctttctaagagttttaccattttagctctcatatttaggacacagaaccattttgagttaatttgtgtatatggtgtgaggtaggggtccaacttcatccatttgcatgagagtatccagttgtcccagcatcacctgttgaattgactattcttttccgactgaattgtctttgcacccttgtcaaaacatcagctgactatgggcttacgagtttacttctagactcttaattctattccattgatctatatgtttaacctttcaccaggaccacactgtttggattactctagctttttaggaacttttgaaataggaaactagtaattctctaattttgttccttttctagatggctttggttattcaagattccctccaattccatgtgaaatttaggatcagcttttccatttctgcaaaaaccaccattgaaattttgatagggattgtatggaatctacatgtcagtttggggagtactgctatcttaataatattaagtcttctgatccacggatatttttccatttatttaggtagtttttaaagtcctacagcaaggtttgcagttttcagtgcaagtcttgggttaaatttattcctaagtatttgattctttttgatgctattgtaaatagaattgctttcttaatttcattttaaattgtccatttctgttgtataaaaatacagttgatttttacatattgatcttgtatcctgcaatcttacataatttattagttctagtaggtttcttttttaagtgtgtgtgtatttcttgaggttttccaaatacaagatcatatatttgtcaatatacatatctttcatttttctttccagtctgaatggcttttatttcattttcttacctaagttcactgtctagaatctctggtacactgttgaaaagtggtgagaaaagacatccttgtcttgtccctgatcttagggagaacatcagagtttaaaatggaaatgcctgttatttctttggtgggaagaaagccagagccagaacttgtttggtggcaaacaagccctgggcaacctttttgcaatatatttttgcagcagcaaatgagtgctttctgcaaggatgctcagggtgctgtgagatcagggcctctaagaaagaaatgattctccatcagatgaatcagctcgctccctcagccccaagtcctttgctatgtgaacaaaacataaagccccttttctctgaccaacacaacaccctgcctgaagcccacagatcaagaggggctgctgtctttcacgtgtgcttcctataatgggcacttcacagctcactgaggagactgacagggagatggcaaacctattaggaaattctggcacatttataattccataagatgaggaaaactatttgtagggtcatggagagaagtgacttaccagctgcaccaatagtgccttgaagatgccgtggcctgactacgtaatgactgtcttagtcatgacaccgataagcttcaaatctacaccattacagtttgtacaacaggttggcttaatgaggttgatgcagatgctcaagagcagttattaaatcctcacaatgagactttagcaaatgagggcttcaacaagttgttgccagtaagtgataacagtggaagccactcagttgcatcagacacatgtgtaaggtgctctgagtgctagacgctggtacagaactccaaaagaaaatcaggcctcattgccaaagctcagggataagtctaaacagaaaggcatttatacagcaacaagaaagttactgggggctggggatgagggagggctggggtaggaggatactaaaatatttttctgaggtgcccaactgcttgtcttagaagaggctaaactgagccaagtgtctctgtttgtctcctccaccccctcctctacagctttacaatgttctctagcagaagcaaaaacagggtcactgccatcatagataaaaggatgggcggccgagcgtgatggcttatgcctgtaatcccagcactttgggaggccgaggtgggtggatcacctgaggtcaggagttcaagaccagcctggccaagatggtgaaaccccatctctactaaaaatacaaaaattagccgggcgtggtggtgggcacctgtaatcccagctactcagtaggctgaggcagggaattgcttgaacccaggaggcggaggttgcagtgagccaagatcgtgccactgcactccagcctgggcgacagagtgatactccgtcttaaaaaaaaaaggggtaagtaaaatgcacgtactgtgtgtaatcatgtaagtaaatattaaggtaagaattgccaaaatgagtcaaatgtgcacacacaaacataggtactgcagagtcagaaaactatacttttcccaggtttattattcacactgtctcaagaatgcatctactagaaatatattcttcttagaatattaaaaagaaacacttgagtgaaaccacagacttaacacagtcaggtgttgcttaaggtcatggctgcaagggcatagtaaagatttaatcgacactgccaatgatgccaagtaaaataatattctcattctaatgttggaatctaggttaggccccacctgcaccctatgttaccccagaatgaagtagaaaaaataagtacggaaaacacaacactactgaatttgggtaacaaaggtatttaacttactcctttggaaccataaaaacttagaaaagagatccgagagatcatcattcaatcttttaatttaacagacacggagaacggcatcaatcaaggccagaactgcagttaccagcaaggtttaaaaacaaacccaagcatcgtcctgttccttacaggaagggaaaatgttaattcagggtcaatgaagcaccatttaatattcgtgaataatgggcctcatatatagtgcacagtactattttttcaatttttttatttttttttgagactaagtttcattcttgttgcccaggctggagtgcagtggcgcaatctcggctcactgcaacctccacctcctaggttcaagcaattctcttgcctcagcctcccaagtagctgggattacaggcatccgccactacgcccggctaattttctgtattttcagtagagatggggcttcgccatgttggccaggctggtcttgaacttctgacctcaggtgatccacccgcctcagcctcccaaagtgctgggattacagggaaaaggcaccgcgcccagcctgcacagcactattttgaggacttacttagttttgaaacatgaatttttctttcatctcactcactttacctaataatcatttaaaaatgcaaataacaccttttaaaactatactttcaagtgaagtcaacagatgattgcttcagcttaaaaatatgcttccaaagataaacacgttaactcctactctcatagaagtattatcagatgaaggaactggctcataaatgctatcttcaaaataaagacaggtcttccaccaaagccatcttcttcggaaattactgggcatggggtgtaagggagtgtggaattgtgtgaggaggctgggggcggtgaggggaaatgcattagaaagatcttaagggggaaaaaaaagaaatttaccaggattccagcaacaaattaagattcctattcttccctgagaatgaacactagagaacatataccagctcttcgtggcttctgtgctcatttatctgtgatctcaactctgctaaaaaaaaaaaaaaaaaaagctcagggcttctaatgccatcacagactagcgtgccccatgcatttaaacatgcttccttctcatatggtgaaatcgggaagcctggctctcaggtttgggtgaaaatgagtctgcttcatggtactgacttttgccaggatgtttcccagcctatgcccaagaacagattaacaacaaaaaatgatttctgttcgttacttcccacaacttctggtttgttcccttatcagtaaagagattaattttagaatatgattattatccattcttttcattctaagaaaacacaaaatgcatgctctcttagtttattttcttacaagtaaaattactccacctgcacaaagcagcaaaactgaagctctcaacatttttgtgttctgcaaaaaaacagagggcaaccctgtggtcattcaattttgggactctaccgaccaaccctctaatgtgggtggaggcctggatgaattagaatgacaatctcccacccctcccatttagacaattcgtgtttagacaaagagctctcaagaatggctgaaatttgagagaacaatcccaacggaagccagctctatcaacctgcttatggagaaacctcaggccagatccactagcaaagcagcaataccaacaaacccgacactacacctgtcctgcccatcgtatgatgaaaagcccaccacatacaaatctcaccatggcagaaagcaaagaggtcaatcgacctctaaatggtggacaaatagcttgctgcttcaaattctaggaatacttattttacattttgatttttaatgtacatataacaaaactcattttaggggcctaaaaacaactttttttttaatgagatgctttaagtgtagatttttgagctaatgaggaaataggaggaggagggctttaaagataaaattccagtaaaagatacaactaatttgatagctgaacttgggcagatactttacctttcgaacaacaatttcgtcatctgtaaaatgggaatgaaaatgcatcatgccctgttgtactcttcaaaagggcaaaggagattgtaactgaaagcattttgtaaattccaaagttcataattattatttttattaaataacagcaacagttattcatgatcttattaaaatattaattttccaggatcatttgaaattctcaagtgctaactgggttgaaggtaccatgttagttgctgtgaggttctaaggcagcccctgccttccagcaatgacctgttaggggaagggaaagctactcatagctaagagtgaggccaccaagagcacagggctcttgcatgatggggacagcaggcatgccatgggaaccaaggaagggaagcaaataggtggcacaaggcactgggtcttgatgaagggaccatgctgcacgtgttcaactagactccagcacacaggaaaatggtaggtattttgttttaatgtcttattattaaaagcttctcttttgctaacatttctttagcccacaattacctaccaaaggatattttttccatgggagaacaaaagaaaaactgttgtttattgcttcttcagaaaacaatgttctctctaaaatgtgtttcagtaaatagcattaatagctgaacaatctgcaattaccacaataccacttattgttatgtattaaaaagaaatcaacagacaaaaagagattattccccacaaggagagcacttttctcacggaaacaaaaattgcaatttaaaatgcttttcttgacattatatccttctatccaagtctactctttatgaattataaaccacagtcatgatttaaatctcttatattcaaaaatcattcctctccaaatgggagttaatgtatcctccttccccaagtataactttagtacctgaaatgtctctagaagctattcctgtgtctctcagtgcctctgtgcctggagaaaaatgtaacatttcttaaagtcttcatagaactctaaatgagaaaagatggtcttacaggtcaatagctatattccaaagagcaggaaaatcccttctgcaatgaaatgtaccattgcctactgaaggcctaactatctttcccttcccaaagtcccagagtcatcagaaacccgtttcatggaataagcagcacaagccaaacaggctatgtatctgttcaccaattcatggatgcagtgacttgagtgcaaggctaggtagggctcaagctctaaagtgaatgttccctttttctgaggctgtcctagagcgtcagacagccttggactgaatactttagagcttgaaaggcttacaaacacagaacctatcacctgccatatttgaacagaaaactggatttagtgtctcctgatgatgagctagaatctacctattagtcctggctctgggtaaaacagtctctctcacacagcactgcttcagacatttgaaaaaggcaattatctgtctccatgcaccagcccttttccatgcaagctgttctctcagccatcctgcttcctcttagctactcaggcagtgctcatgcaagaagtggaacctgagcccccttcctgcctcctttcatacatacagtgccttgggctttgcagatgcaggccacacaactttctactttgggcttccagacaaaattcatctcagataattttcatgttaacttcagaattaatcagaacgttccatgttttatttcttaaactgatttttttagacagagaatttagtaagctgaaccattatgaaattgtaccccctttttgaaaactcatttaactcaacctgaaacattgactctcttaatctccctggttaaatttttgtatgcatttattcccttggttaagctaacagagtgagactttcatactgtctttgattactgagttgtgtcatttaatttatattacctagctcttttcttaggacaatgtcatctgcagaagtactcctttagggcaaggtttctcaacctcagcagtactgacatttttggtcataaattctttgttgtgtttctgtgcactacaggatatttaacaacatccctggctttcacccaccaaatgacagtgcactttatgacaaccaaaagtgtgtccagacattgccaaatgttccctggagggggcaaaattcccctgcccctcaagaatcactgttctagggtaatgaaagttgactagctcaccacagtagaaagttaatgcctgccttgaaactgatagttggagccaaaattgcaaccaaagtggctcagctcagctgctttggttacccattcttccccatgatgctgtgtagatttggaatagccagtctcagaagaaggtctttttttttttcttccattttctatcaatcaatatatctactgagcatctaccctctctgggaaaagacagaatgcactccagtgactctattaaaaaagattccggtgatctgggctctgtgacaggccacagtagagtctccttccagagagaaacctcagagcaaaagaacatgttctcaactgaaaaatgtatgccaactgatacacgatatcacacggtaacagtttactaagaacaaaatctttccttttcccacatatactgagagttgctatactatttttatgctttatttcacgtagcatgtcttattagataccggaagattttgggctaaatatacataattcatattcatgtctgataacatttacttgaaagaaagtctttacacctttaaatccaacaaaggaaaccaaacaaaactgtagtttctggcctgtcaggtagattttcttctctctggatcagcctccatgctatcatcttacactttttaaagctgtgaaacaagttcactgcacatgtgttaaacctcataaccgaaacctctgccatctgttacctcctacatatttttactttcctcattgaggtacaagtgggctctgtctacagattaatgaaaataattattgattctacagctataaaaaaaagaaaaaatatctcgcatttatttttggtgcagtcatctatctgaagtctttatggcgattgatagctgaataaagttataataaaactttcattgataaattttgatgaatctgtggcttgtccattcccacaaaaccttgtggaaaacactcggaaggcagtggatgctacctgatggtgtaacgttaattatatgacagcttctgtattttatcactctgaatttgtacaataagcacaaacaggaattatgattaacttaacaatacatgtcaggagaggactgtcatctctcacctgtccttataaatattatccttcaatcaaacctaagtcaaacttggaagttttgtttattgctacagtaaactccccttatattcaataatatttcattaacttgagtaaagtaaattcaggtcagaagttgtatttttagaaaaataaaaggacttgtttttaagtgctacattactttcagaaataattagtaacaaatatatgtcttggctaacaaaaacatcaattacagagccctttagatgtcccattttaataattataaatacatttacaatttgcataccaactgcttgaattccaacagaattagaaaatatgttctcttaagtacagagaaaatgtccctggaaatctttcctgcacatttctaattcctaacaggcaagaattctttggggacaccccttggtgtatcctcggatgcacccatttggcctgtcctatgctataatgtccaaggtgaggaagggtcatcaagacatgagtcgaaacttacagtccctttatcctatcatgcccacatgtcttccttttctcaattcatcttcttgcctttctgaaccaacatttgccttgacagataatgggaatcgtgccaggacactactttctcaggatgcttaccaatcagtactacatcctacctctccaacatatttctcacacacagacaaacacacacacacacacatgcacaaaacacatatgtgcatatatatacaaaatatatacacatataatgaattatacacatagacacacacacacacaaaccccatctgtgcctcagtccttgttagccctcattaccttgcccctgggctattataataatttcctttctgtgtttgttgtcatcattctttcatgattataattcacccccactttatcactgtggtttaagcttcttaaaatgctcttgtggtcatgtggagtatcatgctcaaaaaccttcaacagctccccactgtccatgggatgaaaactactttgaatcaaggctctctacagtgctgcctggattcatgaccatatattatttctacgcatatatctggcattaaatcaaagccactctagtcattgttcctgaacacagcctgaaaagttctgtatctttgatgtgaaactccatcatgcttcttgtcctgctatttaaatcctatccattcttgaaagtcctgctaaatcccctctcctttgtgagctgctttcaaatcaacttagctaaaaggatattcaacagttcaattttcataacatgtatatcactacttatttggtcttctgcacaagttgatggttagtacagatacttgtttatgcatctcacactctcataacctgactaggtctttaccatggcaggaaaaaatattcaacataaaaagatcattgaactttgtgccacatttaggaaggagtgatgtgaccctaataataaagtgcctaaaaataaatcagaggatctaagaatgcttaatgggaaagggtctgagaggctctctagcccaattcattcacttgactacttgtggataggtgagggccccatggccagtgagtgacaaagctgagtctagctctaaggtattttagttcccagtatcaggcctgccatccatgagagtcatatgttattcttgaaagtcaatatattctgaagccatcttatatcctgaattcttggaagtacattttccaattcttagaaaccttaggaataaggccccacattagtcctatttttacttgttgtataaacctatagttttttttaaactgtttttaaatgaagctttaacaaagttagccttctaaaggtctaaagttcctctactgatacacatcaaagttattatttcatcctcggaacatcagttagatctttaaattcacaaataagtactttatctgctagtgttgagttaaaatcctataaattaaaaccttggtaaaatcacttgctgtacagaatgagcactttagagacatgtattaaaattatttccagggatttgagataaacaaggcctccaatttgccatcctaattctttacctttcctggaactgaatactcacttatgtttcaccttaaatatactttgaaatttatgtttatctaacatatatggttccatagtaacaagtctaaattttcagcaaagaacaattctttgtctgagaaaaggtgatgcaattattacatatgactgcatgatacaggctgtctggggttattaaaagagtcaggtatggccaatttacaagtatcacccctgcaccttgctttcaaagctcactgctgagtcttaatgctcactgaggggcctcatgggatctttttacaaacgactgtttattattatattattccatcatatacctcatgagagggggttgtaacacccgttaagaaaatcatgaactactttgacttctgtgatagaatactgctctatatatgatgtttaaaattatggttttttttaacattgatgtgacaaaacgttcataaaaatgtggagttaaatgaaagcaaaatgttcctacaagctaaatattattgcctacaaaataagtggctaaaattttaaaaatacaaaaattaaattaatgctcaagtgcattcagcaactgaaatatgaaccagtgttgatcatgtattgccagtgaccagcacagcactttgcagagcagttactggctgagccagggtcttacttgcaggcaagagaatccactgttttgagattaagaagaaagagacttctatgagggtgttagatggtctggagaatgtctagaagtgccagggaaccaatcacaaatctccacagccaggaaaaagctggtaagcaggaacacccagccacatcacaaggctgttccagcagagcccactgtctgctcatctcaacagtgatggtggtgccggagcagaacctccatgacaggaggacccagatccccctgtgctgctgcccaccactccccacatctaccttcaagtgccatgttggctggtgtctctgctggacagaacctgggtcaatgccaacccagctgcaaggagtctgggacatgcagtgttcagctttctagctttccttgtacagaggctcattgggtggggtgaaaagtgagggaaagtgagccgatagccatggacacaaaagaagcatttctggatcataagcatacatgggtaaaacaaatgtatcaatcggtatgtctgtctacagcacagggagtggttatttctccacacgttgtaaaattccacaatgcctagttatgttttttagtcaaatcattatgttcaaagtaagaaaatgtatatggagaaagaaaaaaaatcaacactttaagatatcagaaataaatgatggtgttgctgttcttctccttacccttaatattattacaagagctcatgcttactaagggatcatatccatgatccagactgaatgcattacatgtttttacctctttcaagtcttcaaacaaccctctgaggtaggcactattattatcctcattcgatagataagggagccagagcacagcaaacccaaatgatttggctaataagtaacaaagccaagacaggaaatcagacaagctgacttgaggtccatgctcttaaccaatacactttatcacactctattacactagatcttaactttatgctgttatgatccaaatatgttacttcagggcagaacaacaaacacttctgcattggagagaggcctcatgcttttttggtgcattataaaacacaatattatagatgaaaatgacaaagacccacatttcccaaaatgtctatatgcatatttgcaacaataattttacattaatgtaggctttgcatttaaaagagaatttaactttgatgtataacagacaaattacattaagacattaaatctgtaagtcattgttaaaaaatagctcacttattttaagcaaagaaaaccttccagtctctgatacatgttcttacaaacatgaaaataaaattcctttcctcaactgtccttttccatttcacacatattgatctttccatctgttttaaataatcatgaaattaataaaaactgtttttaataaatccaaatcataggttctttcatgtcaaactattttggggaattctgatgtgaaaaagctgcttaagtgttaggaaaaactgagaacaacaagaaacagctttagaagagaaactgaaggatgatgaagaactgagaaggcaactgtggaaaggtctttccaggttggggcagggtagtttaataaggaggattctgaagtggagtaggaccaagggcagagcccaggcaaaataaaacggaagggagaaacaacatcaaggctgttggaccaatacgcttgctgtgaatcaataaaagaaaacatacctggtggaataagccaagcctgtatgtgaattctaacaggctttttagcctgtggcactgggcaaaagttttagatatttttttgaagtttcattatttataaaatgggcctcaggggcctgggtactatggctcacacctgtaatcccagcattttgggaggccaagacgggaggactgcttgagcccagtgagctatgattgtgtcactgcgctccagcctgggcaatggagcgataccccatctctaaaaaaaaaagcaataataaaataaaataaaataaaataaaataaaataaaataaaataaaataaaataaaataaaataggccatggtatttattgaattgaattgcagagaagattcaatagtacaacatcatgcagtccccagcacagagtccagcactgtgagtgctgaagaaataaatactcctaagcaccatcaccagcccaccctcagacacaaagcagctgagcagagggaagcgtactgggagactccttcacaggcaggccgggtagccctgaaagtcacgccaaattttcttcataatttatagttattttggaactgtttataatcctaattattttgtaaaccactaacatcaatttttaaaaaaaattcattgtcaaggaaaaaataaagccatttcaaaccatgttttcgatcacaccaatcaaccacgaacccatgttacatatgtaccgggggaaatactacttgataaattcattgtgttagtattacataagttattaggataaccaaaactggttaaaaatactaaaaacagttgctttggaatgcactacatttttctggctgtttggtatatgtattattattttttaagatacaaatggtcatgtctgtttacataataaatttgctatcatattagatgaaactataactttccaggattgccagagaacacaactcatgagacatctactttacaaattgttttttaaactaaaaaatgtcttcaattactatgaacatcattatgtttgaaaatactttttagcatcttataacttatttaattcaacactttattggtcactactgacataattttgataccttcagatttaagaaagaacttcatgaaacaaccaagccatacaaagcataatgttcaaaggcccatgaaccacaaagctgcgtcgtgcagacaagtgtgccacccagaggcaaaaggaagaaacccaccttggattttatttgtgagacaaaactgataatgttcaattttaaacaattatttatgattatttatttaaaaacacaggacatctttcataaggttctctctgcataaataaatccttttgctgctaggatacataaaagtgtggccctttgagaattctcacaaaatagaaagaagccctgagatggtaccagtcacaggtacatagtttgttaattaaaaaattgaatttaactgtattctctaccataaatgctttcttttctttttataattaatataacatgtgtttccagaattacataagttctgaaacaaccactatgatctatttagacgtgtggatcaaaagttaaactaattaccagagacatttcttaacttaaatgaaaaaaagtttctttcattaggtcttctgcgtaattttcatctggcaaaggaataaagtttacttagagtaattctgtttggcagacagtcagcgcttctaaaatatataacaataattgttaaggttaaagaaaacagtcaactctattaaactcacataaaaattcaagcttctaactaagcctaaataataggctgattttaaatagagatttatgatatcctcatttcatcttagaagtctgaatgttgggattactgttagcattggaccatcttttaagatttatgtattccactatgaactataaaagatattgagccttaacttaattaaaaacataacatgcattaagatgtaaaaacaattttaagcacaaaatttggaaattcttttgtctatactataaaattgtatttcttgaaaatgatttataaaataatttttttcaggttctcaaatgttatataatatactcttatttcatctcattttactgtttcatttccacatcaacacatcttaaaatagaaagacaattctaaactcatttatgtgactttctaaaaaattcattctaaggaacattgtttactgctaacttacttgtttttataaaatgagaaggatctatagttgattattatttccaagtaaattttttttcctgcaaaatattagcataaggcttctttaaagtagggtattgttaagtaaaccttcctcttttgtttctttcactgaaggagttcattattatctgagagttaattgtcttttctataccccataatcctccacataccctgagttgcatcattctgtaaaagatgcttccacttgcaatgatgcctgtaaaatatttgagcagggagtacaaacaattctactttgtgttcctatttctacatttatctaggaaataaatgagattatgggactaagccagcctgctacatggatgtcctctatacactgctaaaatcacaatgaatatgacagactactcactaggacagtatggttattatttcatataagagttcaatgatttttaaagctcaaagtaagtattgggaaatacatactgcaaactatttaaattcaagtacattctaaagcaacaaaaaaagtttgcttatcaggagaataacttcttacatgtaccctgaggtatcaaaaggtctgtgtgtctgcatcataccttcaacgaatacaaaaaatgcagaaaggacagttacttgatagttaataaatgattcaagttcattaataagtatttacaatttaaagggtaaatctcaaacactccctatacctctatattggttaagaaaacctagtaataaaatgaaatgtcttaaaatttattgaatcttttctattcctttctttccatccccaatgctaccggcttagttcttatcatttttttaaaatctgtattaaacacttcctaattgttctccatctacaggccaatctctgattctatcctactatcacattttcaaatccatcttccaaatgcagtccagaatctctgtgaagcataaatcaatcacatcacttgcctgcttgatatcccaaatcaagtcaagaatccatgtgtccctatccgtaatctccctcaactggcagaagtcttcccaagggaggaaggtcagggtctggccacaccctatctcccaaacctagggcctacaaggaggaagaggtagctagtggctccttgggcctttctgttcgaacttgaaccaaacttaaattgcattgggagaaattaaaataactccttatcaagaaatgtctggactcatcttctatcttacaggtaaagtctttcacaaaaacatcctaactactaaaacaacaattttcaaacatttttaaatgatcagtaccactttcttcaaaccatatttaatgcagaacccaaacaaaaagtggttataatagtattttgaggttgacaacacaggcagaggttagatcatagaggccatagaataaaattaaaatttggttggcacaatgcaaatgcaaagtcagtggggagaagaagcagggatgtgaaacctgatttacatttttgaaagaccattgtgcttgctgtgtgtaaaagagttgaaactactgagaaattcaacacttctgatgtattttcataaatattactaatgtctttaaagagtgatatgctatttccaattaatgggcaatcacaataaaggagtcgcagaatacctgatcctcgctggttaatcccaggtgcatcacaaggtaaaaatgcaccaggaaatctgagtttggcagaacgtcctggcgtctggtcatcatggcacagatcagcctgtaggcttgtagtttgccttccttatattcatttggcagtgtcgccgcctgtcaaggagatgatgtttccagattaaatcaagcccaggtgcagagtatttcaacatttcatttacttctcagttttccttaagagttgtttatggacatgtgggatgcagttactttagtaagacccagcctgtcttcaaaacatgcagtcttgggcaattacatttttcaaactcaatttcagaaaggaagaggaaatcgcaataaaggaataaacacatatccacttgccttaaacagccatgatgcaaacattctgagtggtgggatcaaaactggaggagatggagaagactggttatccaggcttattgctagattatcccgtatctaattcacaaagaggagaattttagggtaggtaacattacgtttatcccaacagtatttcaacagtcttctgtgaccatatagctgctttcagttaatttctataagtgaaaacctgtaatatttacaagtttctcttttattgtgaaattatccttttgaattacatgtttggcttactgtatgtggttttagatttatatacaaaacaaaggcattgtttttccttgaacgttaatggctggggaggtcctgaattccaaacgataagtaacattttaatgagttatactgaacaaacatgaaccatgtttttgaaaaaaaaatttaatacatgtgaatgtcagaacccaaacaaaaatcagaataaaaattgtatgtactactcaggaggctaaagcaggagaattgcttgaacccaggaggcagagggttgcagtgagccaagatggcgccactgcactccagcctgggcgacagggcaagcaagactccatttcaaaaaaaaaaaaaaaacttgtatgtactctaagattctactttcataaaaagaaagaagactatatattaatattggctatttctatgaatactgatgttaattttcttctttgtatttttctacatttttcaaattgtatacaatacaaccaatatcacttttataaagagagtaactagaatgacttaacatcctgtatttaatatcctatagcaatattctacttttgcactaaatgaaataacttttgcatttataaaatagtcatgttatatatgattattctttgataatcaaatggactttgtctaaatgtaccatttgtgtttcggaatatgttcagtagttaactgaaacacagtttttacattaaatgataagaccattttcctggattagaataaaaagtaacatagcagaacttacctttgctagtttgtaccagagttcatagagatagcagaaaactctggcatggatcttgggtgactggatgttattcacatctccgaggatccccaagacccttcgccataacacagcagcagagtctgggtgccaaccagtgaggctccccccggcgattatactacagtcatctgtgaggcactcgctgctatctatgcagaaaaacatgtctgttaaccctgtaaacaatcttgatttcatcataccttttttctttaaggcaaattaccttaggtattcaaagtaaaataattaaggcaaaaaatgtgaaacagctgagaatttaaaaggagagaaaagcaggatcaaggaagaaaggtcaaatgattttgattcttcaaactaaaagagcaacaagctaagacatgacataacagttcctggagaccctgtgatgggttttatagatcaggggagaggaagagggagacccttgagcaggatgggtgggaaacagtgccatggaaatgggtggccagggaagcctcaatgctggagtaacatctgcggtggttgttgttaggtcaggttcatgggggtgaaatgtgcatacaagaaatttccatccctttcaggtttaaggagttttaaggaatgtatacgttcatgcaactgttgccataaactgccaccataattgaaatatggaggatctcatcactccaaaaagtgccccttcataattggtccccttcctctattctcagcctcttgcaactactgctttgttctctgttcctatagttttgccttttccagaatgtcacatgaatgaaattctacagtttgtagcctgtctggtttctttcactcagcaaaatgcatttgagattcatctgtacagttgtgggtatcagttgtctcttcttattactgattaatattctattttacagatgtgtcatagtttatccattcacctgtagatatttagatttgttcctgttttttggcaattatgaatacagttgctataaacattcatgtacaagcttttgtgttaacatgtttacatttctcttaagtaaatatctaggagtgagattcctgggtccggtcataagtgtatgcttaataaacattaaactgaagaaagaaactgtcaaactgttgtccaaagtgctgttacggtttgcactcctgcaagcaaagtatgagagagttccacttgttctacatccttgctagaacttgatactgttggtttttaaaattttaaccattcttataggcatgcagcagtatctcactgaggttttcatttgcagttctccagtgactaaagattttaagcatgcagtgatatgtgactcgaacttgaagacaatgtgcaaatgggctgtgcagctctgtggggaagagtcagttagggagaagagctagagcaaaggctgtgagataggagtgtgctaacaagttcaaggcatagaatgtctttgtaatatatatttaattatgaaatatgaaactgtgcattgaaacaaatagttaatgaagaatttaatgatttacatgtatatctaattttaccgattaagttatagaattttgttctttggatacctgttgctttagtatgagtaaaggctagaagactgatttgagtacgtctccagcttcctaaaataagcctttgaatttttagagtaaacagaaaagcagccaaagacacacaggcaccacttaaagaatgatgtattataacaaaaaaatttatttcatagtatgtatgtaataatcaacagaggcaagcattttaactgcacattgtattttctcactcttcatccttttgacttcattgcagcatttaacgcttcttctcaggccctttttagacaattctatctctatttgcttccatgaccaagcacattcctctaatctctcgcagctcagtttttaaattctggattccacatctccaacctgcagcctttgcacaaagttcagtctctgttctcatgtgtcatagcctcagcccccatgtgttctatccctcttctccactggcatggtgcttgagtaggccaccaaagacttccatgttgtttaatgtagtgctcaatgtccagtcctcagcagcatttgattcaggtaatcatgtctcctttctgaaatgcttcaaccatttgacccccaggtatgactctcacctggtcttcttttgctggtgcttcttcatctcacagactgtggacactgaagagccctggagcttttgtcttctctatctatactcatgcccctcttaatctcatacagatttactgccagacatatttgaatgccatccatatactcacagctctacatgcccatttctggcctagatttctttcctcaagtttaaactcatttctccaacaacatatttgacagctctacatgctcaggactgaactgaagcagaaaccataagcaggcatggtctttggtcagtttcactgtgttcctgaagaacctcagatatatgtatgttgagtttgttttttttttttttcctggaattcaaaagactctcttcctgctcaaagagtatgaaaactctcctttaatccctctgttttcaagacagcatctctgcactcagacgtgttggtgactccaagccagaacccgcctaatttactttcaccattttctagggtgaaaaagcagtggccagtggcaacagagctctaactagttcttaaacagacttacagtcttcctgtttttagccccatcatcacctcctacttttgtagctacctggtatgggaaattttctaacccttttagagaacccgcattaatttaagtcaggttgtttcttggcttcccctattactgacacaggatttaatattctcaggtctgccaattaatttaccacaggccacctgttctgcaacttcaagaagttggttgctactgtctttctcctgccatctttgtccttgtggatttatgtcttatttaatataaatcctttcaatgtggcttaagtacggtttggagaataagtggggctatttgtgtttgttcactctactgtctttaataatatgcattattataatttatgtctttgttactcatttctcttgcttatttttaaaagccacttattttataatttttgttgttggctttaatgcatttatatttggtaattttttcctgaattagtctttttaaaataaaatttattttttaagaacaattttggatttataaaaaattgtgacaataatatagtttccatatactccgtatctaatttctccactattaacatcttatattcgaatggaatatttattacaacaaaccaatactaaaagattattataaagtctacacttcattgagatttccttagtttttaggtaattcttttttctgttccaggatctcatccaggatatcacataacaaatagctgtcatgtctccatagcctccttttgactgtgagttttcttaaaactttgtttttgatgaccttcatggtttttaaggagtactggctttatagattgttcctcaattggaatctattggatatctttctcataggcttttcttttgcattcctggaatgaacttctcttagccctgatgtatgatatttttccaacattcttcaatctcatttattattgctttatttagaattttttgcttatatgtttataagtgagatggtctctaattatgtttttttcatactgaccttgtgtggtttgtttcaaggtaacataaggtagataacagaagtgagtttctctttctacggaatgggatgaaaaaggtaaagtttctcttttacatgaaggtttagtaaagctagaaattatcctttatttttatagatctatttgaatagcatactgtattattttaaaaatttatattggtttcgtagttgttcccttttcacctccaacattttttcttgatcagtcttgcctgtttgtctatttttattagtgttttcaaagaacaatttttagttgtcttctaactattatttgctttctagtacatgcatgtatgctctcagctttattagttccttttttattaacatgtatgttattctgttattcttttcctaatttttgaatagaacacattgtgttaatttattaacataattattcccaaagttctcttcttcaccccatacaaataaagccggactgatttctaggcaattatcagtccccactgagtgtcatctcgagtgtatatgttgttggcatttttaaggcctaatcaaagaaactgaagcacaatctctggatctgaggaactcaagtagaggaatgacaagggcaacaaaaggcaagaaaaaaatgaaactgaaaaggagggcaggtccaaaaatggctgctcactataataagctatgcttattaaattagtgatggaaagatcccaagacacacataaaaaaagatgtaataatgatggcacatggtgtcttggaaaggccttcccaaacacagaagcactgttccttcttagaggaaaacacacctgtagttcccacaagagtatcatatactcaactcaggagacacatcaaaatgtgcaaatatcatccaaactggaattcctacacactgtgcctgaaaggcagagtgcaaaaaacctaattatgggccttctgggttctctgacttttataaaacctcggaagaaagactcatcatcctaattctgtaaagtaagtacaatatcaggcatctgttagtctgaaaaggtatgctgaagcatcaataaatgcttatgaatcaacatgagcccccaagtgaacaagaagcataatatggcatttatttttctcataaaggatgtcatggcatttttcaatcccttgaggagaaaaaaaaagtaaggggattagataatttacagctttgtttcatcgctggttaaaccttcactccaaaaatgtagctatccaaaacagagattggtccccagcatcccaatcacactggagatttgcttgagtaaccactccaagtacatgtagacagatacctcatcatcacctgcacctcttttcaacctgccaacgaatatgcccttacttatgaaagaatcccacatagaaaatctgcttcagtactgctttacactcagaaaaattcatgcctcaatgataaaatcctaggcaacatcctccataaaattatcaaggtacgctgacttctttaggagtttctgagatgcctgtatgagtttcctcagtattactatgaacaaaaatgttaatgagttgaaatgttttgcccaaaattactctgctggtggcgtaagtgacagaacagatgctgacattttacatgtagagggttcctcagtgaaggagcacttaattaaaaatgggaatttaagagacttcagacaatttcacgttcaccctaaaaatacccaatatttattttattttatttttcattagcagcctagtatgctagcctgctatctttttgttttattactacttaatgctatacgggtgtttaaaatttttttattaaagtgaaaactcttacaagcataattgtatcatctttctccaaacacataaataatttttacaaagagatctaaaagtttagaactttgcaaatatagaaaggatttcagccacaaaataagtcttggtagttggcaaaataagcatttaaggccaaatggtgatttaatatggctgcaattttatataagctaggcacagtgttaaagaaatgtagcctcggtctctgaaaaaaattttccttttgatttgaaaactaaacataaaaaacaaactcaaaggcctgagtgaaacaacttaattctagagccagaaaattcaggcctggcctggatgtcaatgatcaagtggagaaacagtaagatggcatcctgctcccaccagtgcagcctggctctcctctccttcttccactccttttcaaggatgtccactgctcactgcaaagatttcagaaggtgagctaccaatgccccagtagctatcattattatttttctttctaatatttcatgacttcgaaacacatcaaagtctggtggaaatgccaaaaatataggcgatgacagagaatgctgacaaagcattcttggaaaaacaattttagtggcaggtaacaggagctgtaattcatattcacagccataattaaaagcagaagtggcaaaaaaatttctgtaacatttggatgcaagactgtgataaccacactaaataaaagagattttgaaattgtcttatgtattatttctaaaaaattaaaatttaattgctcttttcagctatataaaacaacagcttgcagcttaaagtgtatttgttcgctgattcaagtatttattaaatgcttctctcctgtcctgcaatattctcggaagcaagaatcagctgtgcacatagcagacaacaggcgtccccctcctggagtctgcattccagtagagaaagaccttggaatctcccaactaaaccaagatgctagataacatttctcaccaaaccttactttaaaagttatcactgagctaacaagaacatggaaagaaaagagcaacaaagctggctttttccctttgtggttctgctaaaccacagaattcttaaaagtttctctggtaatgcagttttcattttgctgaggttgaattactgacactttttttatggttagctattttttaaaaaaaatcatagaaccttttaaaaaagacgttttcttccaaaagtttttaaattttccttttcacatttatgtactttatccctctgaaactgactttggacatggcgtgaggtaggaattctatttcatttttttccatatggctaagtacttgtcccacagaaatgtgttgaacaatacattgtttccttgtcagacctgacaagccacatatatcatatatcatgattccatgtctgtgtgcactcagtgctatattttatcttctgttccatccgtctatttgtctatctctatgattacaactttaagtaaatgtcatagaatttatcacattatttgtgactattaggataaatgttgtgtcttctgtcctttttataagctcttaaaaactatagtggcttatgacttattcatctttttatttctcagagcatctaaatcagtatttctagactataagcttatttgttaaataagggatgaggtaaatgacaatactgattcttagctgtagactcataaatgtccccctcccctgactatttcaacagaactaaatgtatgcatgtcttaagtatattttcttattttctgtcttctcaatgctctggcattagggcctcactgatcagggaaggactgccacttccagggttagctaattcctagagatagaagtctattcaccaggcagcatgtctttcacatgcaaacctaccaattcaaaattcagaccctccaactacctcctttctctagttctcacatactaagtcaatatcccctgccctgtcatcctaggactgggtaccaggaaactagaaacagcccgtatgctccagagcccactgaagtcattcatattagtaatcctaaaactgcataccctgccttgccttgctatttccatagaaatgacactaaaagcggttgccccattttgttccttctgcctcctggtacttccctgcatgacccctgtttccagggatccgtgagtataaacttcttcctccatgacaatcatttccatgtctgtatgtcttaccacatctgattaaaacaaatcccaggtaaactttaagacaatgcacagtaaatttagctgttattttcagcaaacatgatttaatgagaaagcaaatataaaagtaaacagtttgccagtgatgaaggaatttaagattttggaggcagtttattattctaagcatttgataactggtaggattattcaataagaaacaaagatataatcaaattgtttctctttgcatgtcctaaaaatcaggctcatatgagttttattttgaacatttatgaagaaattgctctcttaagaacagaaagttaaattcagaactgtgataatccttaagccttatcacattacagtttgtccttttcacagatgacaaggtgaactattgaactgcgtgtactgattctctatattagtatttcaaagaagaacggagtatttggaggagttaatcacaacatggagtgcatcatataaaattacctcacagaggtttattaaattgagctgtccaatacataccctgaaatgggatcaaaactaatctttccaaagaacagacaaaagaagtaatcacctaattttcttccctttcaataaaaataattaaaactagtccatgtttaagtaaattcaacctactgaagcttcagttttgcctcctacagtaccacaatgatgactttcttttggataatctgtaaggattctcaagtaggtcaaagggctttacagtaattttaattttaacaggaacacagtgtaaaggagtagacatagcactgcacgttgagtcaaaacattttggaagccagtttcatctctggaactcacactccagcttgataacaatttctctgggtctcaatctccccatctctaaaacagacatgataagacttggcctgcttcccatacagaatcaaagagaatgcctcaaaattctttgtaaatgttgaatctcatatcaatgtatagtattattagtcaaaatcattatttagtctataaagaattttactgaataccaccttcatatgttaattttatgaagttttaatgacattctatcaagaatttcccaaatatcagagacgttagttaaattttaaatcacagtgaaaaccagtttgcttggtttaaaaaaaaaaatccatttaaggtcaaattttagcctttatgttaatcattttaaaatattttttggcattttaataacactcttaacatgttactttgtggtggttgttttcatacaagatacctgtgtgtgaacatgaatgtgcatccataaaagtcttggctctggtcagcctttcccgcactgattcctcagaccacgagtctctcctgacactccacaaaacaaagcaaaaccaaacccagctcctccatggcctccccgttctcatcagcctggtcaaacaggtgagggaaactgacctttgaggttgacttacccagtgtcacacagtgtgtgtgtgtgtgtgtgtgtgtgtgtgtgtgtgtctgtgtgtgtgtagctaaaactgcagactacaccacacacaatattttgggcacctgacttagatgttcactcatttattcttccaacagccttcataaagtacgggctattatcccaaatttaaaggcaaagaaacaaaaggacagagattaaataactagctcaaggccacccagcaattcctcggaggtgcctggaagccgacccagaaagtttggctctgaagtcaaacaatctgaggttaaaaaagttgcaaaaaatacagagtatgaagtcattttttttaagtttagaaacaaaactaaatgatatattgcttgacacacacggtaaaactataaagaaatcaaggaaattagtataaaaacaaatttggactagggtcccaagataatgggagaaggggagggacttgagaaggacctctaggagacctcactggcttgggtgccctgctagttcttaagttgggtagtagactcactcgtgttcacttcattactgttccccgtaacttacatactgtatatgttacaacttacattttatgtatcaaaatactttatttaaaaattaatcaataagctatctaaactctttgacttatcctggatttataacatgtatgagttggaaaaatcactcttctttctagcatagaacaattcagtcagggatagtaaaggcttgacatgaataccatcacttcctcctatggtggacagtggtcaggagcatggcacacttcctcctacaactgtttcagaaccctctgtatacaagactccaatgattcacaactgatctcccagctgtttgcattagtgcctctttttcaaaatgcaatttacctgttaaatttgaagcatcggtgggactcagttgtaaccaatgacgggcatcagcatcagccacaacatctgtgggagtattcagttctgggtcttcctcacaggtctgccatgggcccatggacagctctgcctcattggtacagcccagagttgtgtcactgttggtactttcacctggtacaatggaagaaccaaagtttaagataaaaaatagctgaaaatcagaatgttcacaattactgatacgaaagtaactaaacaaacagcagacacagtaggaatcattcatgttctttggcagaacctgcagaacttgagaggagctcaaaaagtgtccacgtggggctcttggtcaagaaaatgaatcttccaaataaggatattaatagccattatgagcaccactatgtatcattcaagtggcactcttcaacgtgtcttcactcagtaccccctacacccaaactacaccaagtcctaaagtgtgctgggacttacaaaatgaggatgggtggaggaagaagataataactgatccaccacaaatgcaagtttactctaccgggtagaagagtctaaagatgctgtatgccccaagcctgacaggtagacgtagacctagggtgactcattcagggtcatctggggatatagtgtcccaatacaacagattttctagaacagaaattctcccctttaaacagtaataagttctaatttatcataatataataaggctaggccacaaagacttatagaactatttagtctgacataaaatgaacctagacacttctgcttctcagagtctcctgtctacttcataacaactttatgcatctacatctctgtctgctcacccttctggctgctctctgtatctactcctaacagtcccttactcttgctgtttctaatctgctgtcctctatttactcacaaagaactaaaagttgtctcagtaaccaggtgaccaatggtaggtcccaaacttcatctcctaaagagctctaagctagcagggtgaaggtagaactcctctgcacccatcaagaactgtcctgaacttgaggaggtgtttactttgctactctggcacctgacttcaggaaagcagagtactaaggctgtattttacaatatatgataatacgtctcaggattccaatctcattccatttctaagtatttaacccattgacttcaatgtacttctgatgctttttgcttctagcctctgggaactttctggggaagataatttttctctccggtctatctgctcactcatgccatcagtctctgatgtaccactcacctggagaaaggtccaggggtagaaagacaggcctctcaaggtacgggtgagtagaactgttttattatatgtatggatgaaccttttgtcaatcctaggattccaggaataagaaggtcccatttcacaaccatttctctcaaattgataagctattactcaagttagaaggtaaaaagtgggaagatggcttgagcccagtcattcaaaaccagcctgggcaacatggcaaaacctcatctctataaaaaatagaaaaatcagccaagcgcattgacatgtgcctgtagtcccagctactcagaaggattgggtgggaggatcacctgagcccagggaggttgaggctgcagtgagccatgattgtgccagagcactccagcctgggcgaaagagtgagactgagtctctaataataataataataaaatgtaaaaagaaaatagaacatatcaactctgtagttggaggaacagacatttcccggaacttactcttctgtctttccctacattttccttgtgtctgctgcaaatcatctttcaaatccaattcagcagggctgctgcttcttcgaactaagatcttcagacaaaaagaaatattgcatttactacaggaaagttttcattgttataagacttaagtttctagcccaaatttctaaagaaaaagaaacaaataataataatagctaaataaattgatgttttccatttgaaggatatgttttcacaaatcactatatttaattttatgttactcaagatctgaaactttaatttatatcctctactttgtcaacttacatccatccaattaaattgatctaagaaggaatgctaaattatatggaaggaatttgttttaaagttctatttgttcttctggtcaggcacacatatattgtgaacacaatgctctaggaggcataagttatgcacacaaatgataagtgtgctggtagggaaggcgcaaactccacccagagatctaaaggtccattcagtgtcttcctagttaagcatgccacagactctcctgagcattgcttaaccttgtattaaattcacaggattaaaaaaaaatcaggaggaaatctgcatcctctaataagttataatttgcttggagagacaaaacatacacaaattacacaaaataattataatgtatataagcaaaatatgcaaataaactgcctctgaaggggatgcagaataaactgttgccttaattggctcagctttataggagagctgttcaagacagcaatggacatgaagtggtagagggaagacaggaggggattcaaggcaggaagtactgggtggtaatcagcaagttctatgtacaggaagagatgctggttataccaggccatgcagggcacccaggtgaagaaggacaaaaataagaaatgcagaccttctaaaaagacacagctgccagtgggccttgaaccttaggttcaagtggggaacaagatgtagagttaaaagaaaaaaaagaatgccccacaaatgttgaccatggcaaaactggaaaaaaaattaaaagaaagaataattattaagctaataaaaagcaagccatgaataaaatatttagaagatttagaggattaacactatatgaaaaaactattacacagccttaaagaagaatgatacatatctaatgtgctaagaggaaatatgcacagaatatttccttagttaaaaaacagaatgtagactcttctgcttctaactatatgagagacacaatacctcccagccatagaaccagatcctacataaaactttagttgcaatttggggctcacaggaagtaaaagaaacttccaagaaatctaccttcaacccttaaaagtgagcagaaaccagggcagtgaaacgtggctattgcaagggtaaatccaatagtaccactgccagtggcaagaggaccaagactccaggattaaagtagcactctccatgtggtgcaagaaacaaatgcaaacatactgttgaaatgtcatcaatttagaaatccacgttttctgcagattaagatcagccagctaggaacccataataaaacatcaccaaacactaaagaaaataaatcaccatgtgtaagaatctcagaaacaacaaatatcagatttagatcccccaaggatttcagataatcagataaaaaattcagaattgcaatttgtaaacattttaaaggaataaaagttggaatcacaaaaacaagcaagcaacaaaagattattagaaattacaagatatgcttgaaaagtataaacgtgaactgtcagaaataaaaggcataattgctaaactaaaaaattcaatggaaatattaacagtaaagataaagttactgaactgatgaaagacagagctgataaaattatccaggaaacaccaagccaatgagaatagaaaatataaaaaacatttaagagacaaggaagacagaatgggaaagtctaatatatttccacccagaattccaggaggaaagcaaagagagaatataaaagaggcaatatttgtgttcttttttttaaaaccccagtgtcccatgtaacaggtggagataccactgtaccaatgaggaaaaaatgagacaatatatgcagaaatgttaccaagaattttccagaaatgacagaagacaagcacttacagatgcatggcacatagcatataccaaaaagaacaaacatacgaaccaaaagattcctgcacctaaatatactatagtgaaatggaaggaaaaggacaaacaaaaacagcaaggaacaataaccagacaggaccggatggacagaagacttctcagcaacaaagaaagacaaaagattatggaaaaataacttccattagaaggaaaagggagaaagaggtgggaaaactatagtaactgagatgttgtactgtccgaaagataaagtaaccaagaatcaagataagaaacaccaaaaggaggccttacatatctcagaaatagcacatatgaaagagaggtggcatttcagatcaataaagaaaaattaattcaataaatgggacctgacacaagtagttatctattcaggaaaaaaaatgaaattggatccctacctcactccataaacaggaatcaattccaaatatataaaagacttaaatttgtagagcaaacctgaaacatttataaatataatatttttattcctgtgtagttgagacttttaaaaaattccataaagcctcaacaataaaaatgataatagagaatatcaaaatgaagaacttctgttcatcaaaagataccctagagaaggtaaaaatataaaccatatattggaagaagatatttgctacaaacataaccaaaataggatcagtattcataccatacaaagagctagtaaatataaataaagagaaaaagacaaaaaatagaaaaacaacaaaggacatcagtaggcatttcacagatgaaacaaaaatggccaataaacatatgggaagatttttaaccttattagtagtctaagaaatacaaaataagacatcttattttcactcagttgaccaataaaaatgaaaaaatctgataatagaaagtgttggcaagaatgaagatgaatgggagctctacacaatgctggcaaaaatatgagtgatgcaaccactttagagaacaggggttatcttgtaaagaaattattttattctataagtcattaattccattcctagatagccatcatagagaaaacattaaacatgcagatgctgaaacacatacaagaatgtacatggctacagttttcacaaaaacaaaaagctggaaacaatctaaatgtcaaccaacaagagaatgaaaaaataaattgtggtctacttatagtggaataccacatcacagaaaacttgatgaactattgctacatagcacaatgtgaataaatcttaaaaatatgtaactgagtaaacaaagcaacaatactttattaaaaaattcaaaagtaaggacaactaaagaacatcctgtttagagatacatagttacatagcaaaactacagagcaaagcaaggggatgatgaacacaaagccaagataaggcccctctctgaggggagatagcagagagagggaacaaggaaggagtgtagaagccaaaatgatctgaagctgatggtgggtttctgggtatttatttcattgctgaaaacagaatatacaaatgtaaactggtacatgccctttttaaaaataaagaaaaaagaaacataacatgggttattgtccagtgggaggggagcaaggagaggccttcccttttttattttgtatctttctgtgatgtttgagttttctaagaatatatgctacattttaaaaaaatgaataggggttatctgcatgaatgagttatgggcttatgttttaattttcttctttatactttatatatatttaaataaatgccattttatgttttttgttttttgttttttttaagaaacctaacatctttgtgaatactcactgattctagtaattcatgtcaggtagaggctacctaaatggatgtcaggaatggggaatctgaaacgtaggtttaacaggcaaaggtaactgcttaaaaatacacagtgccatacacagaccaggtggtgaactccattttcatgttaatttttttcctatttttgtaatgtgactgtaattttacatagaaagcaagcaaaatcttaaaagatctcaacatcatttgggcctataaactgtctaaatggaaaaaaatattttaattatcactgccaccaataaatttacttactgagcactaattaatgtttatttttaatgacaaactgaaatggcttgaaaatatcttactgttattccttcatgttctctcttcacatgtcctttattctcttgaataggctgaggctctgaagaactcgaattctgtgtgttttctgccttttgacctagaaatggtggggcaggggggtagcggaaatagaaggaatgtttcagatagtaaaaccggaaaatgattttatatataggtaactattaaatttaaatattctaaggtatgtaaaaacaggagttatgggcctggcaaaacagcagcctatgggtcaagtccacactttagacctggtctctggcccacagagagctctgaagagagtggattgattactgttcactgtggccaacaggttcacttagcgcatttatgttcgcacaggggagggcaacaaaacccttcctggggtcttggggaaggtatctcagagaaaaagtgcctgtgttggccagatgaaccaacaggaagaagagagcagtaaggtgcctcagtattgcttgagaataaagattgacgaaagcacaaataaccagtttcagtaataaaaaagggaatatcaccacaaagcctgaaaacactaaagctgatcataagaggattttatgaataatctgggggcaataaatttgaaaaaaaaaaaaaatttttttctacaaaaacataatttatcaaagtcagaacaagaaatggaaaatctaaatagtcctataactattttattttaacttttttaattttttaacttgacatataaaaattatattaatataatatgtataatatattgttttgaaatatgtgtatacactgtgcaacggctaaattaagctaattaacatgtatcacatacttttttgtggtgagaacacttaaaatctactctcttagcaattttcaagaatacaatacactgttacaaattacagtcaccatactgtacaacacatttcttgaacttattcctcctccataagtgaaattatgttaaaatataaatgatattttaaaacattcctacaagaaaaatgcaggcaactggtagtttctaccaaatatgtataaaaaaaaagccttatacaaaacctttcaaaaatctttcagataatacattttctgaagcttttactgtattttcttatttccagaggatttctaagacagaataattccctactcatctgatgagactagcatgactttgacattaaaagatatgagataacttgttgataaatagagttgatttcttaactaattcatgacaccaaaacagaataactatttccaatgatactagacacactttaagcacactctttcattgagaaatctattcttcactgtttacaggtcaaaccatctgtctccctgctttccacaccctgttgctgctgcaagttgttggtgaaaccgtgtagattaatgctattaaaagttattattttccatctcagcagagtcggcaagctgttaataaactttttcacaagtctggtcagctttccattctcattttcaactttaacggctcttctcacagccctttccctatgtccctgcccccatcctgcctccctgccttccataatacctaacttgatgccctacttgacttcatgttgtaacagcctccgtcttccttctactccagccacttggactcctgtctcgtcctcaaacatgccaacctttaaaaaagtgggtatatatctacatatagatatataaaaataatttagataaacaggtttaaatagtgcaaatatttcattgccataaatcacatccttctaatcaaattaaaaaggtaattcccttgaaataaatatattcagaatatatgtacaaagcaatactatatgcagcttttattcctctgccagaatctatagttctgtattaaacactgaagacatcatgtaccctgagaagaatctgagcacagcggctcggggatgtcggaggtgctgctgctccgaaggacctgctgctgctgtcccactgtgagatggccagatccggctgcaggtgcattttctgactgttgacactcctccacttctgtgagcattaacaaaacatgcaaagttacagttcaagtttttaaaaaacacattcaccacttaaaacaaccgatttaaaaaataaagtttcaaatgcttttcacaaataatttatagtcagataatctgcatttaaatgatcaagtttcctacacttgctaacccctaatattctactccaagagtaccttttccacttaagttctataaagccttttatttttcaatcaaagtaaaggaaaaaaagccacaataaaaggttaagaactgtaaaagtcatttgacatttcagggccaggcatgccaaggaaagagagattcaggagatgcacagaatgggtaatgtacatttgagaagaacagaaaaccacacacacacacacacacacacatacaccctgaaggaagatgaaaggaaatgtgggaatttctactgcattatgcctttttaacaggtaagtgcccaactgtccaaaataaaatgctatagttatgtaatggcttatttcatcaaatgcaatgctgaattattctctaaagtacagaatgatccacaggtatttgtagaaaaccaatatatatgagacataaaatagaaaaccatagctgggtagggaccacaggataatctcagtattattacaagctatattcccctatagaatgagttccccccagctcatttctaaactgcacagtacactttaatctctaaagaccacccaaggcactggaattatcaccccaccctctctttctagagtcacagcttcagggttgcaccaccttttacgtaggttgttttaatagcctgcaaactaatcactaatcactgtccctctcttcttaccaccttcatatttatcctctccatggtccatctaaaataaagatctggctgtgccactcctcttaaaacccaccaaagccctctcttgttagagattcgtcaaacatcctagtcagggtgaacacaggctttccttgatctcacgggacatactgatccccttgcaaggtactctagctcactttagtctccagtagtactaacccagttggcacctgctactctgttcttcctgctgttcactcccctatgctaaactcacacctgctccctcatccctccttaccatgctgccctgggaatatcccctacaggacctgctccctggccctgcatgcaagccccattgctctgtttctcactagattccacactcactgacgtagtcatgaaactttacatccacataactagaatattttccacaaattttaatttgctcattactactactaagaagaggataatcaaaactcagcctgtattatcttaactggctgggtcacctggtttgtcacctgaaatggaaactcactgtcaatgggccaccctctgtataatcctttaatctgagtcataaggcaaactgatggctcaccttaagcaagaagtatgttggaagattctacatttaatacagaggatttcaacaaaaggttgctattttttctatccaaatgaaaatgcattttatagtgtgctgatatggttacaagacctcaaaactatgaaatttgtgtgatccttcacttacaaaaatttatcaatttactttttttttttgctctgttgccaggttggagtgcagtggtgtgatcacagctcactgcacactcgacccccctggctcaactgattctcacacctcaccctcctgagtacctgggagttctggtgcacaccactatacccaaaaaatttttgtcttttcacagagatggggttttgccatgttgcctaggctggtctcaagtagtccgcccacctcggccttccaaagtgctgggattgcaggcgtgggccatggtgcccagcccacagtctaacttcagatgctggtgggaaactgtttggagtacaagcaaagataggccaaggtagcaagaaaagacagctatgttaaagcctcatgtttcccaggttgtctttgccttcctcttcttttgaacagccaagaactgttcatttttctacagagaaacacaaagcatatgtgcacatttttaatctacttacacatcccaaagtacagactacgtccttctcacagatctatttctagtctcttcagccttcagcaacagaagccaaataacaccatagggccagcccttccggctgtcttctctaattgtttattctaattatgcaagatgttgaaaccttctgggaacagtttatatttgttaatgaatctactggttaatccagtatcagaagggggagcccaagagcttcctaactttctaaactataattggcaaatgccattttttatggatagtgggaagagttagtctctgaagcctgatgccaaaaacagatagatgttggtttctgggctatgagcaggagcaaataagagctgagccaacactggcagcatcttcctaaagataaagaacatcgccatctggtgggatgcaatatagccacagcaccattgcttccaaattagagcgtccccactggtcctcaacacagcagacggacggagagcctgccaccaccagctggtctgccttcccaacaggctggcctaatgcagcttttaaggctttgtttttataaagctgtcaggagggacgtatcagatggagaaagtccaagccttcaggaatagcggtcagtagcagggcaggagcactcgtgatttagtgggaaggaaggggagagccacgatgcttaagtgtgctgttgggttgtaggtgccctgagctacctactcctgtagttgactatcaattgagatggtgtgaaaagagaattttcaattctccttatcccacaatttaaatccaatttcctgatttgtaacagtatatttattgggattttctcatattttatattaaatacatgttttgtataaatgaatacatgaatgacagaaacaatttctttatactatttttcctttttaaatagttcttgggctccctctgctggcattttatttaagaaagagcaatttatgttaaatctgctctcattctgtggggttagctgttagcagttgctctttcataacgaatgaaaatcattttaatagtgatatgcaaataccaaaagacaggattatctgatatttaaaatggagaaagaattatatcagttacaataaaattatataatacatcctagatctattgcattttctattttgaatatcacacaatttgtttaaatcacttcaaagagctaaattctatcttagattcaccaaataatgtactctctctaaagcctagttagttccaactacccagattttaaaagcactaactttctcgtctcttgacagtgtaagttacacaataccattactaaactattactttcttttttttttttttttttgagatggagtctcgctctgtcggccaggctggagcacaatggcgtgatcttgactcactgcaagctccacctcccaagttcatggcattctcctgcctcagcctcccaagcagctgggactacaggcacacaactggctagttttttgtatttttagtaaagatggggtttcaccgtgttagccagggtggtctcgatctcctgacctcatgatccacccgccttggcctcccaaagtattgggattacaaagtgagccactgcgcccggcctaaactattactttctaaagctccattcgaaacaccgaaaaatgatcaaataaggattacttaatttcatttttttccactgagaaaaggcagtgtgatcaaattaagtgtgtaagctcttcagtaacttctatttttttttccagatctctatttttcacagcaatttcactcactttttaagtcttccttactcagtcttacatttagtaagtggagtgaggctcattcttcaataaccaaaattctgagttccatttatcccttatacaaggttgcataagcaaaataaatagtataatttcctaatttttaaaacaccttgcatgataccaatctgatcctataaaaagcataggaaatgcatatcagctcagcatcttgaggtttcccacaagatcaaacttcccaagggtaaatcagaccaggtcctgacaaaaaagcacttcctagaagcacacaaaccagatgcagaagcagcgaggcaaggtttgccataccattccaatatgcttttttagaataaggggagattgttgatcctctcattactactattacaatattcctaaaagaaaaataaaatctactatctgtaagtgctacagattgataaatgttttaacctaaaaagcagttaaaattgtagaacagaccggacgtggtggctcacacctgtaattccagcactttgggaggccgaggtgggtagatcacaagctcaggaattcaagaccagcctggtcaacatggtgaaaccctatctctactaaaaatacaaaaacttagctgtgcatggcatgcctgtaatcctggctactcgggaggctgaagcaggagaattgcttgaactgggacctgggaggcagaggttgcagtgggccaagatcgcaccagtgcactccagcctgaggtacaaagcaagactctatctcaaaaaaaaacaaacaaaaaacaaacaaacaaaaaaactgtagaacagctggaaagaactgttctcacgaagggaaaaaaacaaataaaagaaaatcacaaaaagtgccagtcctacctccccaactgtgtttctttatgtagctattcatattaatggaaacaggtggttgtgactccaaaatacaaacgtcacttcttcctcccagaatatgaacaacccacccaaaattctgctgctgccgccaaatacagtccccaaaagatcagaaaaacaaacaatcgtagctaaaagtaagtaattgtctattgcttatattattaaaacaattttggtgggtttctaaatcacatagattagaaacaaaaacaaaaaaagttaaatgtaaacaaaattagcaatcatgttaacttaaatgtaaacaaaattagcaatcattgatagggtaaggagcttgtgccagaaagtaaaattaagtgtcatattatctagcagtatgttggtggggtatgcctacatacttggatttaaattggagggcaaattcaatactctaatgtgccaaccagtggagaatatacaatctgcccttgggtcagtctcttgataggacagtcataaaggacaatggcaacattttaagtagtaaagaaccaatggcatcaggctaagaagctcactatcatagttggaatgtcaggttgttctcaaagtcactatactctaaagttctttcaccctttgtgctacaaaaccaagaacaaagatggcaaaggcaggaaaactgcagaccgagcccaggccacttgatttcactctgacttaggatttctcagcctcggcacagctggtattttgggccagacaattctttgtttgggagctgtcctgtgcattgcagactattcagcagcatccctgacttccatccacaagctgccactagcactgtcccacttgtgacaattaaaaatgtctccaggcattgttgaaattgtccccaattgagaatcactgctctaaatcacatttaacttcagttggaactgtatacgtatatacaggaaccaagagtcttagtaaaataaaatgtaatattgaatgagaacaaaagcttccaaaattaaattactaataggaagagatttcttgtgggaacatgttctggacaaactagtgaaaaacttaagagaaacaaaatatagaaaaaaatggactgtgacataagaaaacttttcaccatgaaaaaaattcttttggggtgtgtattagccaaacagggggtaaaatcattttaaatactttattaatcatctccaaacaatagctttttttgaaaaccaaataattgggcagttaaaactcaacagtaatgtaattgactagtgaccattttcccatgtaccattcttactgtttttcacctttaatagttactggagaaaaagagttttctaagaaacattatagtcctcgctcttggtaaaacttcttcccttaaattctataaagtaatatggtatttacatagccatcagagaacgtaagctttcattttgctttgctaaaacacagtatgacatagtttagtactacagaaagccacaattaggttatctccaatgttaaaaaaaatactaatctttgggaggctgaggcaggtgggtcacgaagtcaggagttcaagacctgcctggccaacatggtgaaacctcatctctactaaaaatacaaaaattagccaggtgtgatggcacacacctgtagtcctagctactcgggaggctgaggcaggagaactgcttgaacccgggaagcagaggttgcagtgagccgagatcatgccactgcactccagcctgggcaacagagagagattctgtctcaaaaaaatcaaaaacaacaacaacaaaaaatactaatctacaacgccaaatttctgaaaataaaaaagatcatgaaaatgatctttctcttttaaggaagaagattcagttcatcctagaatcactgaaaaataaatagacataggcctaattattcaatatagagaaaggtaaatccttctgttgaagtaagtaggccaaaaatgacttttggtgctatgatatcttaataaaaaatgtactgtgtgtaaatcacacatggctaaattcaattttaattggctgaagtacaggaacaacgtttctttgttttggaaattactgctttttggcactggtccttttgcactcaaatttcaatagtataaatctatataactggtcattacttcacatatatgatttattaactccaagtagatcccgcctacatacatttttctagtttattcattttttggaaggcatagtaagcattctaatactgacattctcaaaacttttatgaaaatccccttactttctatgggcactgtatagaagacacactaaggcaggcatcacatttccccctattaaatagctatggactgaaaaacccttctatccttcttaattgttattgccaagaccaaagttatagaaatttttcttgactatctaattgccattaagtatctaactacacaagagcaattactagcattcattgcaatttaacactagtgtaatggtcaggcacgtgtgtgatgtggggatattaacaaaggaagcaatgcccagaggcaagcgggagaagcccaggaacagtgatggacacatgagacagtattacagtacctgacagcctgtgagagcaagaagagtaagagagaccaggtaagagagcgctcacggtgtgaaggaggagcgggacgcttttagtggcaggcaaagcctcagaaaggtggacacagttgctgatagactggcttcgcttagcttccaggagagataaagtaataattatgtcagaagaacaataggacctttcactttattattattacttttctgggctctctttaaacatttaaaggaggtcatttaaacttttaaactttaaaggaagtcagtacaaagtatagtatttaattgtagtctctaaatacagccaactttcagtcagtcattctcatgacacaggacaatgggcaatccacaaataattttattttgaaatgctttatatgtttagcctttccttctttctgctgtgtatcagattcacattcaggttatttgcctggacagacattataatcagttttcctttcctaaaggacaaatacaaaaagaccatggtgagagagggcatatctggccttcattcagaagttggtttgctgagagctgactgtattcaaaagcaaatcatttagtaaattaaatatccaaaaagctcaagaacacataaaagtcaagttgaacattaaaagatttgatatttgaggaaaaggtaaaatctccatgaaacccatccttttatgtcacatttcatgcttattaaatccatacatcttaagtgtctactttacggtgttcttatgttttctatatactgctagtcaaataaatattggaggaattgaatgaacataggaggaaaacgtgcttcatatatgtaaaaccacaatctgtaaaatcagttttattctaaaacaaaaatataaagatttacttgctgctttactattttcatatgacatcagttaacattaatgaaatggaactacaaatgatagtaacacatttgcaaaaaccggaacaaactttttaccctactgccctttctcctaccctttgcctattcgaattcccaataggctgggagcctgtaatcccaacactttggaaggccaagacaggcaaatcacctgagatcaggagttcaagaccagcctgaccgacatggtgaaaccccatctctactaaaaatacaaaaattagctgggcatggtggtgcatgcctgtaatcccagctactcgggaggctgaggtggtagaatcgcttgaacctgggaggtagaggttgcaatgagccaagatcacaccactgcacttcagcctgggcttttttttaagactctgtctcaaaaaaaataaaaaataaaaaaaaaatccaatgatagaagagctgggcatggcagctcactcctgtaatcccagcactttgggaaacagagacgggcagatcacctaaggtaaggagtacgagaacagtctggccaacatggcgaaaccccgtctctactgaagaaaaaaaaaattagcctggcatagtggtgcgcacctgtagtcccagctactcaggaggctgaggcaggagaatcgcttgaacctgggaggcagaggttgcaatgagctgagatcgctccactgcggttcagcctgaacaacagcatgagactccgactcaaaaaacaaaacaaaaaaagaatccaatgataaaagcaaatagtttttaggaattggaatgagaaaggaaatcagtgaatgagcatcctcaaaagttgcctgctaacaaagaattgggtctctcctcaggggagagaatgacagaaagaaagaaagaagcagaataggctgtgcatgtaaataaggtgataatttccagcaaatgctacagcaaaaaagtatgagagagttacagttaaggtggaatatattttcataaaaactccaacaggattctaaaccatctgtattaagcctttactaagcactatagaatatgttaagctttaatgaatctttgttttatggccagaggatcttgcgactttctgaagtcaacatgttaaatatcaattacaattgtcttaaacctaagttacaggctcaaagtcactggggaggaggtggctttatttattcttattaaatgccgtatacaagcttctttttaaagagttcactttttgttttaaaagtaaaatgtagggcgggcgcagtggctcacgcctgtaatcccagcattttgggaggccgaggcgggcagatcacgaggtcaggaattcgagaccagcctgaccaacatggtgaaaccctgtttctactaaaaatacaaaaattagccgggcgtcgtggcacgcgcctgtaatctcagctactcaggaggctgaggcaggaaaattgcttgaacccggaaggcagaggttgcagtgagctgagatcacaccattgcatttcagcctgggcgtcagagcgagactctgtctcaaaaaaaaagaaaagagaagagaagaaaagaaaagaaaagaaaaaaagagtaaaatgtagcaaagtagtccaattaactgggggttgttggtcaagttgttaactgaaatacgctgcaaagataacatccacaggcatgaaaaggctcaattttccaaaggagcaaaaaatgaaaatgtctatccagtcctgaaattctccttttctttgctgaaacaggttgccacactctaaagattaatattgtttaacactgacaatagtgcaactactggtgtatttattaacaatctattttcttcaaggttcaaacaaaacctgtattttctctatttcgcacaaatatctcactcaatatcaacatcacaagttctttctcacaatggaggatttagaaataagtaactgaaaactgtgatttgaaaagtaaccagagcataaagctaaaaagatgtagagacatttcatttaatataaggtctaatatttaaattttgagtagaatttttaacacactttatgcctataaatttattttagataacaattagatttttgagaagcatttaaataaatgtttaccagttgctttttggcgaacaatatttcttgccttttccactcccggtgctccagacgtggtggcactcctaaatcgcatcggttcggtcacatctgggtggctccgccagctgagagaaaaggacctccccacggtggttcctttctgaggatctagaacacagcctgataaaggaaaagaaaaataatctaaaggctgaattcattattattcatttcacgcttgtgttgctcagcaaatggtgtacctacaactatatataatcagcaggtttccttgtcacaaattaagtaccacttccttacactgcaatttaggaagttgctcatatgtcactaatttaagaattcttgttgccaaaatattttcaagaatctaaaacagtcttatggatattattatatcttcatagtactcattccaatatacaaaagaaagtattaataaacctttctcaatacaagaacaatatcaaatgaagttatactactgttcccaggacactccaaaaaccactacttataaaccaaaaactcagagatcctgatgttagaatagtactgcatcctgtagacaccaacccctccacaaatccccagagcaatccatgcctataaactctaatgtggattcagtcaaatgggcaggataatgaaaatctacaaataatacaaaatcctattttagcaaaggtccaaaacaataaaacattgtagtctgagattcaacttttatttttcctcatattgttctggttaattatttcaatgagaggctatggaccaaaagaaatagaggaggaaagagaatggcagacttacagatttctgcacaggtatgatgtggccagtggctgccacctgtggcatgtttccacacccagtttcctctgcctgtgctttttgtttctagtagtctagcccttagaaggcaagtgtttctataataaatatttaaatcctttttagaataaagcaacataaatcagaaatattagtcatggtcactaattaaataatgtgttcggtacattttgaaaacagtgttttcgaagttgtttgccttcctaagataagtctgtctctttagatgaatctgtgggtaggaagagaatcttgcagaatggcaggcgtgtgtgtgtgtgtgtgtgtgtgtgtgtgtgtagtgtatgcacacatgtgcactcgtgcatggattacaacaattgaaggtaggtccttatctcctatttcagctctcctcctctggcctgaaaggtatccttagccaggtaagttctcttctgggctgagaacgactgtcttagggaggcaagttcctagttggaagtatctgggtcctctcaggccccgggtttacacaaaggtcctcagagctgtcagagaggactagatggacgccaagggcccagactcttggctccctgcccctacttcaatcctaaatctccagtctatttctttagaaaggagttgtgtataccttcaaccgggaagaaaaacggatctgttaaaaatgttagaaaatcattgcattagacagtctaaatctacattgggattaaactgttccactggattgccatgtacttcaactactttattttggcttcttactaacttgcttttattaattagtgctttggcaagccattctcagatttcaatgaagatataagaatccaccacatttattatacgtgtatatggtttactaaccactgtaactggttcacacctccctgtatccacatcctctgttgttctctcctgtaatgacattaggcttcatcacgtgacttacttggtagcaaaactgaacaagcagagacttgaaatgcacttgaaaatttgagcttaccctcttactgcccctgaaactctaagccacttggtgaacaagcctgagctagcctctggctgctgaaacacgtggcccagtcacacctcattgcccctgctgacagccagtcaacccgtaaaagtagagctgcctagctgactatttcacagcgtggttgactgcaaacacagaagcaaagaccagcagaagaactgactggctgagtccaacccaaattgccaactcatcaaatcaagataaataagtggttgttattttaagccataagttttggggtgatttgtcacatggcaaaagcacactgatactgtctataaggcagctggtattattaaagggtagtctacacaataagcagtgtgtaccctttaagaagctttgaaggaaaaattcctcccaagtctcaggaggacctaataaaagctaagcatcacctaagtgattgaattgtttttaccctatgtgctctgtgattctctatttgatgtaaccctgcaaagaccaaaatcaaatccaatgtttgacttttccatctccccagcaagcccacgaggctctatggcatgtattttggcattttaatcacaatggcagttccctgcaacctcactcattttgaccctattttgtatttgatctactgtactatatgcctttctatgagctgcctcaaatctttacagagtaaggtgtagtacaagtgaattaatccaaggaccatgccacatccttaagcacagtaattaaggggatgccaaattgtcattcctaatagaaactaccactgatgttttctaccttgaaaacataactttcatttgaggttctcagtcccaaaacaacttttacccagaaatacaacaaagccaaaatagctcccatctgaagcattcagaatttctccacgtttcctagagaggctgtagaatgcatcttaatagtgtgacatcttgagttgtatttatccagctttgatttctaaacacttcttaactatgtggccttggatgagtcaatcactgtaaggcaaccttgtccaacccgtgacccatgggccacatgaagccaagaatggctttgagtgtagaccaacacaaattcgtaaactttcttaaaacattatgagattttttttttttttgcaatttctttttttgttttagctcatcagctatcgttagttttactgtattttatgtgtgacctaagacaattcttccaatgtggcctggggaagccaaaggattggacatccctgcaaagtctctgtacttcagtttctttgtctgtgatatggggataatacaagtatctacagttcactaggttattatgaaggtaaaaagagataatatgtacaatgtaatagccattattattactgttagttatcactactattactactaccttccttgcatcttccttcttgcatagcttcctcagaaattcaccatctcattaagggaacagaatgatatgagacacaaattaatgccactattaagaagacactgtgtagttggttcagttcattataaaatttcgcgcattaattgcttagtcatacaaatacacactcgtccccagtcctagacatctggtgttaacctggaagagtggaaatacctttgcctcgttgcttcttttccttttgttcacttaatttatccagaggtaggtttgtcatctcaactccataaacggttcttgcaagcactgctgtcaaggagtccataatgttggcccactcgtttataagttcctcccattccgtgagggaggacagcacaccaagaaagtcatcccagagctctcgagaaatgtacacacagaggtttgctcggatccaagctaccatgagcgtctaaaaccaaccaaccaacaagagaattcacacatcttcatttggaaaaagcatacttttaaacaaaatgttttaaattactattaataacacaaattttaaaataaaaagtacttttggaagttgtttttcttttaattctcaaaattcatttgaccaactataatcaaaatttaagctattggggagttagttatcattatgaacaaagttactgattcaatattgttctagtgtctgcagctggccctggctataatcagagaaaagacaaagccctccgcacagtgacaactctgcttcctgagactgctcttttcctaccatccacagtggctacttcaaacctcctacaggaaaaccgccagcccaccaaatcctccctgactttgagcagatggattcactgcagacttcacaagaaacagaacccattcaatgagactcccctcaacctctgcccatggactcacattcttgcccatattcacccagctccacctccacctgtgggctgaactccaagaggggccccgctctgctaccctgttgcccccttacactctggaccccttcctcggagtcttcatgcctctcttaaccacccctctcctttaatctccagccaaccccacttccccagctctttctcttcagcatttaaatatactccaaactcttcctcatcttaaaagaaaaaattcccttgaacccagattcccccgtctagctacagcccttttccttccattttcacagccaaacttcttgaacgaatgttccacacccgctccatctccacttcctcatcccccaggcaacagactgctctggttctcccctttctgaggccacttccaccttctgcctgagttttggctccattcccatggctccagttatcctctgtgtgctgctgacttctgaatctccatgtccagcttagacctctctactggtttcctgatctatctacctaggtactagacagtgctacttacacaaccctcaggcacctatcaaagagcataatagtaaaaggtattcaatttcttccactgactttctctcagtgccttcacctgctcgctcctgcatctggcctttgcacatactcttccttccctctctttcctcctttttgtttctgtataactccccctcatttctcaggtcaaaatttgtgcatcacttcctccaagaaggtatccttgactatctccccaccaccacctcccagcctccaggaagtgtcctccaggtccctgcattttccccccatcaatgcacctatcacacctttccttcacagtctattcacttatcagtgtctgcccccagtcttatagtccacagcactacaactggtcacctggacagccctatgagacaattatgcctatatgctggatatttccttcccataaaattgccccattccttacctctgccaaaatattcaccatcctttaaaattcaaatccaaatatatcttccctgaaagaagtgcctctacatagccaagtccatctcaaatgagccacaaatgctttcctaagccttgtgaaaaggaatccttatacccaaagtctatgtaagtcccatagcctggtgtcaaagagaaatgcacttgttaagataccagcttgcatgtgcattggcccaacccagatgcaaataggctcccactcttgtcaggaattcttctttgcgtaggtgagttcacttcttaatttttttccccaaattatatatagattttttaatggaatttactctttaacatagatacaggaaaactctgataaacagaaatcagtctataaaatcagacaggcctattctgaccacctggaaaatcttatttaaagtggtccttctgtaatacgcctgttctctgtttcaatttgtgtttaccactttttaagaacataaaaatgttaaagtaggactaaagtagttaattatataaaaaacaagatattaaccacttatatttaaagtctgattctaacatgtatgaacttggtaaaactaaaaatatgaaagaaaataaaataattttatctttattaaatattttattatgactaaaatgccatctcctattaatttttatacccctgctttcaagatgaatttgaggccattgccataacgtacctatagacaataaaattaataaatattagatcaataaatataatctgagccaagtaagagaagaaagtagagactgataatgttattaggactcagactcacatttggatatagcgccagcttcatggataaaagcagatgtcttggtgtaatgagatgctctatactggggatcttataatggcttcactttattgactaattatgaaacaagcgcagaatgacttcttgcagcttataaaatcaacttagcaaatattacaaacatgtatgcagacctgttgaattatcatcataattcacaactgacaacacgtgcacagagcaaaatggtaaaatggtaaaatacagttgggtggtgagtggtggcacctgtggacatgaaggcagggtgtccttttaatcaattaccattttctaaaaggaagagggaaacaaacagcctggactaccctggtttgtgacctaggaaagtcacttggcctttctgtagtcacatttctcattaaaaataagaagtgcataagagcttctccaaggttccttcagtactgaaatttgatgttttatcagatacattttggcacacaagatgtattttaaaaacaccttaactaataaatcactcctgttcttatgaacatttgctaaccaaccacttcctacttcactctaccaacacactaaggggactgcgtaactttaaagtaatggctcatattacaaagagcaggaccacagtttcctgatataccatcagagcttcaagcataaggtcatatttagcactgataataaattaaaacatcacttaaggcaataaggcagtcaccattatttggtaaatatttaaaactaagtcaaattcagtcatcacttaaagaaaatttggtggcccaggttatctactgacagaaaaaaaaacaaacactagaagaactagaaaaagataaaaagggtaataaaaacttaaaaatgtcccgtcccttttaacagtctccttgttctcaatttttcaaaaaaaaatcaagtgtctagccattttagacagtccacatgatcaaatgaatactaattagatagcatgttttaacggcagcgtgggaccaagatgatgcccaatagagagcctggctggtaagtccagacccttagtattcttgcctcttgcatctcacgtaagaacgtgggaggtcaacagatgatcacaaatcccaatgggcccactctgattctcatgacaaccctgcagggtaagaagaagtcctttcctgattgtgacagattagggaagacactcagaaagctaaagtcatgtgctcaaggccacatagccagagagtagcagagctgagatcagaaacacaatctgcctaatgccaaaaagctcatcctctcttcactattttttatggtaggtttttttgtttgttttttgagacagggtcttgctcttttgaccaggctgcagcacagtgatgcaatcatagcttgcttacagcctcaacctcccgggttcaagcaatcttcccacctcagctcccaagtaactgaaacttcaggtgcatgccactatggctggataatttttttaaaattttttgtagagacaggggtctcactctattgcccaggctgcttttgaattcatgggctcaagcaatcctcctgcctcagcctcccaaagtgctgggattacaagtgtaagccaccatgcccagccttttggttagttcttaatttaagcatccttctcgatctacctaaccactgccaaaataataacaacatcaaaatcattaataatcatgaactcaaaactaagtttcagggaagtcaggttaactgagcttcagggaagtcaggtcatctgaggagggaagtaatatctgacaaggttttctccattcatggggggagtttttttttccccaaagatcaaaaccaaccaaccaaccaaaaacaaaacaaaacaaaaaaatccgaaccccagaatagatacttgtttaattctgtgacaagttctctaattccaacacacaaaacagatgcagagccaggcaattggtgggaataaggcccaagcatctgccagtgtgagactggcttcagctcatgtccacttggcagcccaggtccaggacggggagctcgaaagggtgccaacagtgagacgcttcgctgagaaagcaaagtgtgcagtgtccatatgtccaggcaggcagcaaagcagtggtcagtaccaccctccacgcatcagcagagcaaagctggacacatgcaaaagaaagtttagggccacttcacacatccaatgtaccaggcaaggcaatcagagtaaaagcaattgtaatattcaggaggccaattatttcaatagcctctcatacattttttatcaagccaagagcattgactcatattaagttattcaaaattccgttatcttgtgttacaatggcaatatttagctttaaagaaataatttctccttttgtcacttttacctacatgtcctacccatattctagatatgctttttaacatatatcctccaaaaccaccttcaggtcaactgaggagggaagttaatttctcctccccacaactatcacctatgtaattatccaaagtcaagtccatccactgtactaatatctttatttatgtagaatgtagcatttttccagagccctttcacactgttcactttcagtaatgcttcataaactctaaggtcctcataaatattagcaacatcacagtaggctgccatgctcaggactctctggcacatctgttccccaggcagctcaccaggtatcagcctgctcttggtcttcacctgctcaccacatgagatgcaagaagcacaggcatctctttggctctctgctcgcaccaaagaccggcccagccctccaccatatccgggacctcacttatcctctgtctccccaagaccatcttgtcctccctcactggaccatcccattggtgagcaaacatactttagtaccacccaccttaaacctcgcccaccatgtatgccaccgacttcagctagctccccttttcctcttcctttccacagcaagaactctgcaaagccttaactacacttgcaacttccactgcccagctctcattttctcctccatctactccaggtgggactcatcccatagaacattctcaaccaactacatctgtcaaagcccatggtcaactggctgctctcctcctacccaatactcatccccaggcacccaggatacacactcctctggttttcctcctcactcactggccaccctttctcagcatctctcccatcacctgtggacattgtcctctctaggtaagcccatcctgtggctttaaatacaattgcccaacacactgatggctctcaaagttttatcccattcccatactttcgttcatcctttacctctccaaatctacctagccttccaccaaggccatcagagcttcctaattcctaccacccttgagcaaattaaaagaggaagtaggtagcagagagggagaaaagcctaaaagcccagcactaattgtaaagaacagatcataaccttcaggacaaagctaagaagaaaaatttctagaaatttaaatttaatattatttttaaaattctcaatgattaaaactagtttgctacaaaatctgattcatttcttgcatttgcagtgctttcataaaaaagacttaccctaaatagtaaccctgccaagctctgggcaaacaagtcctttatttgtttatcctttggcttctgcatgacagcttctgttatcctgagtagtatttgcaacatctgttccctgggccacccaaaataaaagctcatattaataatcatgtctccaaagcactttaatttataggtaccagaaattctcttaagaattcagcaacattgataattatgtattactcgaaactattaaagtccagatgccaattacataatgaataccatattttaccaaaataagctcccttatgttataacagttttaaaaacatgcctcccatgtccacacaaacaggcaggataaaacatcattccagcctgattttctccccttgcaaaaagagaggcaagatcgtcttctccaactgtgccagcagcttaaaggtactcagtgaaaacctactggaacatatgcagcactctttaattttgctatccactgttttacttaacctgtaaggtctccctctcattgcaacaggaggtgaagctgactttctggcctttattttggggacacacacagtcagtatcttggtaaggtggaatgccacagtactctcacaggcaggaggggtttgcattacaggacacttacaggcacagtgctcatgtctggaagatcctgactctgcactacagggcacaactgagacaaatgccatcactgcagctcagttccaatgtgccagcatttttcatagtctcttacagaaggtttatgtaaaaggactttgaagactataaaatagtacagagacaacataacactgctaattacaataataagttcttcagaacagccaaaagacatttttctttcttacacctaagttatattgctcatatcagagtatctgctcactttttctttccctagattctatgggaacacagaacacatcatctttcatatgtaagagaagtgcatttgttcctcgagggaaatcactctggttcctttcaggtttcacatgctaaccattcatctaatctttactactttctccttggctttactgctctttagtaataaaactgagaataggacaaagtaatcagatgagatctctaaatcatagttcccgtttacttttctcatatctctgcttatcaaaacagcattttctcctaacaatatatgatgctgaacctcataaaattcctcacagtaaaatcacctgtggggatttcctgccctctttgtagctggccccatttgattttggtccccagagtcatctgttgttatacattctcactgcactgcatgctacttgtccatgtattcctattccctgcctacggattctggaagcacagaagaggaagggctatcttctgggcacacacgctgaagcaggatggtgactttgaagagaactgggagaagcaatggcacagtgctgggggacagcttgtcgctcatcacattcagggtacccaggcccctgtcgccagggcagagaagggcagcacctagtatcaccactgcccattcatgttacatgatgcataagacaatgaaaaacaatcccttacacacaactagttacagatccatcatgagaatgtgatgagaacaacagacatcgtaagtttcaagtaaagccttgatcatggcaactgctatcaaaagccacaaatgtgatcaaagccatgactgacaaaaacagttaatttgatttctgaacctatgaaagcttggaaaggcatgcagagtcttctggaagaaaacaagggttgaaaaactatgatttggaaaaatctttccttatagtagaaagattcacaacctgccaaagctgccagttttgacaactgcttgttcctttctattttgtgaagcactgactccaccaaggagaactgctcaaagagtgtaataaacttctgttggagcacatggaatgaggcatgtgtgccatccttgggtccaacacaggagtgaggattttcctgcattcttcattattttcctgatctctatctcctcatacaggtggatttcaactcatttacataccagttattccctatttcaggaccatttcttacagttccctggctacagccctggtctcagccaccatcatctatggcactgcactgcatgttctccagcagccagaggggcctttcagaagcataaattatgttatgtcacaatcttgcaggcacacagggaggtagctggtgtccttcctttggtctgcagggccctgagcaacctggccccggcctgccccctgcctcctcccctctcacgctccctctcactccatctactccaccacattggccatcatcttgtccttccttaaacaagccacttttcttttaccttttctcccatcagggcttttgtatctgctgctctttctaccaggaatgcccttcccttagacctccccaaggctcccccttcccttcactcagggctctgctcagaaaggccttctctgacagctgacggaaaaaactccccgtctgtccatgccaagcaacacacacccaattcaggactctttcccctttgcaaccttcactgttctcagtacttcggagtctctgaaattgttttctaggtttttaatgcctctcagtcctatgaggatgtaacctcatgagggcagggaccttgtctacatagttcgccactatattctcacagtagaagctcgatagttatttattagatggaagaaaaggaggtaaggagagaggggagaagaaggagtgaagaaggaaaggagggatgggaggcaagggattatctggtacttaaatacacaagaaaatccattacagaaactgctcacactcttttctatgctctattgaccatttttccgttaactattttcatcgagttctacaatttttcttttctatactttcacctaggaatctatgaattagtaaaaaacagaacagaattgcttaattttatttcctagaattttcatcaaaataaaaagattatcaaaaatatcaaaaaactactgatacagtagtatacaaaactcagggagttttcaaaggaaaaaaacattaaaaatgatgttgataaaactatggtattcaggaacagatatttcagttgaaagcatataccagcatttctcattactgtcaatattactgacgtggaatttgtttacatcatattgtgcatcactgtaatatttccagttttaacaattgtttaacttggcaaatagtgctaagtttagaagtctgggaaagatgacattggaatctacatcatagtatcattttgatgcctgtggtttctgtacttgtgaactttctgcacaccaagattcttgagtccacccttccctcatctttgaagaacaagaattggacttggtggcctacagttcctttccgatcagacctgcctcgtgtccatggtttcctaccaactgcagacactttccaaagcccctttcctgctgattcaagggcctccagaatacaggcataggcagaggacccttctggtttcaggtaggaaaggtgccactggtctgcagggcctccaaggactgataaccaaggcagaagatcacctagggggatgctgaccacagctgggcgggcagcttgattgcacaagggtggcagtggaatgagagggaacacacaaaggacaggcttgaggagcattttaaaggcagaagtgagaggctgatgacacatggagaagaggaagaaatggaaagtgactctgaggctttctggtctgttgctgagcatcagtgaaaatacctcatcagatggagtaacgtgaggactttttttttttttttttcccgagacaagagtctcactctgtcgcccaggctggagtgcagtggcgcaatctcactgcaacctccgccttccgggttcaagcgattctcctgtctcagcctcccgagtagctgggatcacaggcaagtgccaccacacctggctaattttttgtatttttagtagagatggggtttcaccatgttaggcaggttggtctcgaactcctgacatcagatgatccacccacctcggcctcccaaagtgctggaattacagacatgagctaccgcacctggctgataactttcaaataagagcaggaaaaaaaaatctaatgcattgtttacctgtagggacattataaataaaaacatcaaacaaaaacaaagatgaaaaggaaaaaacgtagttttaatgacaggaacagattgttgactgcactatgtatttagtttctgataatttatcatttaaaataattgcttttccaaaatgaatttaaaacgtcaagttagaagcaataaaaatcagttgacagcatttcagggcaattaacaaactctcctgagcttatggtgagtattataaaacaccagttgctgcttttccacaaaactatgtttaacgtttaaaaggaaaaatccactattaagtaaaatacttattgttcaagaacattttttaaaaatataatgaaaataattgatctgtcaaagtactgggtaactaccttcttcataattcacagaaactgttacaaaagacattttgttgttaagttcgtaaaaacattaaataaatgcaagccttaacattttaattatgttgaaaaacagaaacatctgttttacaatactaattaatttgatataaacttaccatgtctttttattcattgtaagctccattatcatgcgcctaaaaataatcaaaacagctttacaagcatcaacttgttctttcaagagcacaggaacttcagcacatggttccaacaaaaagatgtttgcagagttcgtcaaaaataccttaaaatcaacaactttacattagaaaatataactgaacataaacatttgaataaattttgcttacagatattaatttcactctaccaatgaaatcatttttcagttatttccaaaagattctatttcaataaggcaagtggtaccaacacatattcaaaatttttttttggttcaccttttagaatcacttaaatacagagacacctgaaaagcctttccctaggggaaaagaaaaaatcactattacatattaattgcaactacagaaattttatgagtcagaaaagcttttgaagacttttcaacaacccctcaacaaaaaaaggaaaacaagggaaaaaagtaggatcgttgcatatgagtgagaaactgtagagggggaatgggaggagtagaggatagatggccagacagtggtcagacagaactatgtgattcttattgagtctcccagcacatgaactccttgctgacagaagcatggacagcaccactcaacaggggtcagaacctcaaggagctgtgatgtgtccagaaacagacgaagccatcgacatcacacgccttccaggaggctatttttttttaatatgaaagatatattatgcagtagcatacaaaatctaagtgaattcttaagattaaaagctgagatttcaaaaacaattcagattatcagccaactactctaccctctgcctcagacctttagcatacaagttcactgttctctaccatcaggggtatctcagcagaaaaatgtgagaagcactgatccaggatatcatatactattactgctttgagtcactacagcaaaataacggtgtgttaccatttacacagttgacaccagtgtcccatcatctgcagatattctgagttgtcaatttggtacgaggacagacctgctctatctacctagaggtatattgcctcttaggtctcctttgtgttcaataacacaaactcaaagcatgacggagcttctctagctcatttataagtaaaattttttaaagtattgtatcaaaataaatgtacaatctgacgaaattaaaattaacatcaaaagtcaagtggatgaactaaaatattcacagcctttaaagttatcttaggtaagattaaaacgtattatgtcccaattttctaagaaaaatcactaaataagcactataatatagttgatgatgatgataacttcagtcatgaagaatttactagccttcgagtaagaaaaacaaaaacaaagagctttttgattacagcaattttagtggttctgtttttgaaagtagtatgccacagatgatatattgcaacacagatccttttaattcaatgtatttggcttcttgaatatgaattaaaaactttttgcacattcccatgtaaggagtctttatatacttttactttttacaaaacatcaaaggtactgcatgagtatttcttattaatgtgctggtatcagttaaggtaaaaataaaccaaattagtatgtccagagtacatttgtcaaaagcaactatagaaaactactatctcttgaacatctgagacacagtcggagaaaagaaagaaaattactgtcttatcaaacctccatttggcccctttttcttaataaacaaagtaaaggactaaggtattagatataagaacaaaaccaactatttaaatccaaagtaaatcttttttttaactgtagcactatatataataaaatagaaattgttttttctcagttcaggcaaggacagtaagtcctcatttaacgtcatcaataggttgttggaaatgatgactttaagcaagatataaaaaaattttttttctcatgaacattatgatgaaatgatgttgaatcaaaccatgttactcaaagacctgctgtactcatttcatttaaagtcgccatttccaagaacccactgatgacattagtgaggacctactgtaaatgtaactcaacctttcagaaaataaaaagcactcttttgaaccaaggggatcactggcacctgcaaccaccacaggctgttgctggagatccccttagctaaaagatggagctactgagggacaaagggcaaggactcctgcaagtgtttctctgatggggacgcaggtcatacttatgagcagcaccaaaagtctttaaagatgcacatgtgaaatcatctcaacttttttaagttaacttcaaaattatgtgtaggttttcaatgaaaagtgagaaaattcatgagtatggtatattaaactgctaattcacttgaaaaaaaaaaggataccacgaaaatgaatcctatcaagaaacagatgacagaaaattagaaaaatgcatgtcattcccagatgttccccagactccacacctggcctctacatgagaggcctaagtgacacatctccaaatgtggatgaagggtggcgggcgagggggcagtgagcagggaatgagaggcaccctgtattttcacttactcttcaagctacatgagatctgagaggaaatctcccaattcccatttttgaggtaaaatcctgagctctggggaggttaagtaatgttccaaagttgctctttcaaatgttcccaaatggagtcagttctatttcatatattcattcaaatctaaaaactacatcagtcattgttctttgtaaacacagccaattttaagaggaatattacttataagattttataattgccaagcttgtcttgcaaattagagcccagataacttactactcataagtgtttggaagataatttaaagatttaaatatcagccatttcatattcactatataataatctcaaaaagactgtaaccagtttttatgtcttctttgactagaaaaaaatttttgtaaattgtgggtaggaattagaaagaaaactcagaatgagaatgtaatagctaattaaattgctgtttatcgtttactgacagatggctacaaataccaccatactttatatgacattatccccaataaacaaaaagacaaaatggctccagctgtaggcggtggaggggtcttcatgtcctggccagccacatacctgcaacaaagcctggacgccggctttcacatttgtattttcctcctctgtcacacaccctctgctcattgcacttgtgaaggagtatgtgcgtccccaactggaagatcgtttatgaccagaactttcagatgaggccttcagaagataatgatccattaacagagtggaagatgcacgtgtttaacttgcatttaactataaatataattaaatatattatataaactaagttatatttagttggcatatttaattccttaaactcaccaggattcacatgaaaataggttctaggaggtagagagctccccactcaaccgtcaacacctaaaatagtgctcagcacttagtatgtgctgaaagaatgagttgtgtttgtccaatgactgagtgagcatggaatacagccctttaaaatgaatgataatttgcttacctattcatttagatctcatggtagttattaaaatgatttcaccaatattgaaaaattaaaattatggaacacagatattttaaagtgacatgcctctagtgagaaatttaaaacattttaaattaatttcataatagtatgacagaaatataaatgtcacttaagtttcttttgtttcaggagatattccactctgtcattttggatttatccaacctatagctttatctaacatggacagtggcccctccaggaggccagcactcagcgaggcttaaaggggagggacactgctgtttggttagtcctttcacaggggtaacacccagctgcttctggtacaggccactgcacaacaaaagtctacccaaacattctcaatttagtttctccaaaagatatttatttaaacaagtcaaggagaaggtagtgatttttttagtctcacaaatagacatgtaaaatatgatggcttattaaacaactctcctgcaacagtgaccaacaaagatgcaacacgcagatggccctggctagagttgcaggagatgactgccaatctagaatgggagtacagaagctactctccttggtagatcctcacagaactcagcaactcagaagcatcagatgggataaaaaagagatccacctgcctttgtcccattgacaagactcttgactgagcaagtatactttactaaaatatatttaccctcaactcaaaagacaagtgaaaaaaattacctccttgctatcagtctcggaaaatcctaatttttcagcatcttcttgggcaacatcttttctatctggctcctccatgaacacaggtttgtcctggagaatccactttctgtacacttgaactacttttcttgttacagctatctcacaggaaggcaacaaaaatgcctgaaaggaaaagagaaaactccctttaactacaaacacactcagatcagtatagggcagcatcacggacattcccaatgagcatcacccatttcactttccttggaacacacagcttataaatatactacacagggccacaaatctttgtgcacaccaaacttaccagcagcaagaaagacattctcataagagagccctaaaaaatggcgttaaaaataacttttataggccgggcgcagtggctcacgcctgtaatcctaacactttgggaggccaaggcaggcggatcatgaggtcaggagttcgggaccaacctggccaacatggtgaaaccccatctctactaaaaatacaaaaattagctgtgcgtggtggcgtgtgcctgtaatcccagctactcaggaggctgaggcaagagaatcacttgaacccaggaggtggaggttgcagtgagtcaaggtcgcaccactgcactccagcctgggcaacagagccagactcagtctccaaaaaaaaaaaaaggaagaatgaaaaaaataacttttatattctgaataatttgtctataaaaataaccaaatcaaatcatatctatagaaatattttaattggctacaaaacacaattataatgcacaacctggaccttttcccaacaaatcagaaataggttagaagggacatgctggtacagcaagtggcaaccagtcgtgcccacctcttctcagctccatgttcactgatgtcatggtgttggcctgaatcagccatggtgggagtggttctactacagaagtcagcatctgttacaaatcaggactttgtttctttttttttttttccttttctttgcttttgtccttcttcctttcccttccttccttccttttttgttattattatttttttgatatcatatatatcaggtttctaatatatcaggttactaatgagttcagctatcaatgttaacaagagcctctggcaaagttgtagcattgtgcatatttataagaactttttaacattaaggaattcccttatacatctccatacaacaattttgatttaatgtgagaagattccaataatgttaaacaatttaaaggagaaatgcatttgcttttcgcttatcagttttaaggactatttctatatttgaggggaacaagagggagaggttccccatactcagatgctttaatgtcacagatgaggataccgaggcttacagcaccagaggtattcttccaaggttacaaagttagccacaaatccaggtcttggtctcaagttgctggcacttgttttaatactgcccttaaggttcatgccacaggatccagttacaggcagaactcactttaacaaagcttcatgcaatatatcaatatcgagataactgtggtatcaaaagccaaagtaatgggatttaaaaatgaaataactcaaaaactcagtgtatatgagatggacagaatggacatagctgaagagaaaactggaagaaaaatcagaagaaaatatctagaatgaactatgaagagataaaagaatggataaatcagaagagaggataagaaagagaaaatacaatgaataggttatccaatgaatgactggagatgcagaaaaaaacaggaaaaaaaaagatgggggaaagaaacaatatttgaggaaagagtggctgagaatttagccaaaatgggtgaaatatatcaatccttagatttaagaatcacaaagaaaaacaaggataaatgtgaagtatattacaggtaaaactgctgaaaaccaaagataatcagaaaaatcttaaaagcagccagaagaaaaaagatgtatttcctccaaaggagcaaccacgtgactttcgatgacttctcaaagaaataatggaagccaagaaacaatgcaacaaaagattcatgtgcagagggctgccaatttagaatttgacacccagaaataaaacacttctaaaatgaaagcaaaatacagacattttcagatgagaaaatttgctaccaggagacctgagctaagggaaatattaaaacttatcctttagatagaagggaaattttccctggtcagagatttgggaagcaataaaatgcaataaaaagagaatgtggataaatctaaatgaacaaaacatatatatgaaaatatatatgaataaaaagaataaaactggatgaaacaaaccttacagtggttctgaaagggataatatctacatattacatattcataataataacaatggcatataaactgaggagtaaatagagctaacatgtgtactgagggtaaaagttgaaattaatgctagcatttatgttaggaatgcatgtgttaactattaaagtaactacaaatgaccgtaaaactaatttaatttgagaagaaaaatgggatattaaaaacaatgagcttgaaggtccaatacaactagaaagtaagaagacagcagactaaaacctaacagcagttgctatgttaaacgtaatgaataatgatccaatcaaaagacaaagattgtaagatttaatttaaaaatctgtttaaaagacttcgctgcaatttataagaagacatccaaaacatatggacgggggaggctgaaagtaaagagttagcgaaagatgtaccatacaaacactagccaaaagaaaactggtagagttatatcaaaaatagacaagatagactttgcgcccctcctccagaaaaccattactagagatgaagacagaaacttcttaatgacagcattcaattcaaaggaatataaactaattctaagtctgtattgcaactaataattttgccaaaaatagagcaaaaactgataggctttcaaaaaaaaaaaaaaaacaaatccacaatcagagtaggatactcttccaaaagtggtagaacactaagcaaaaaaataatgcagccaggggagatgggaaccttctcaccagatcctccaggtctcaacctctcacagctctcacctctctgtctctctgaggtgcattcaggataatttcttcagatttgtcatccagctcattctctccttagctgcatctaatctacaattaaacttatccatttaggttttcttttaatattccagttattacatgtctttttaatgtctggaagttctattttcttcctaatctgcattcgtcatctattttggtgtcttttatttctttatttctttaaatatgttaaacctatttaccctaaagtctcaaattatacaactgaagtccttgtgagattgtcctgtttcttctgatttttatgtctagaaaagttttgactcacaaattcccaaggggaaaaaaatgacccaagatcattatacccagctaagctgctctttacacctaaaggaaaaagacgctggacgcggtagctcaggcctgtgatcctagcaatttggaacaccaaggcgggtggatcacctgaggtcaggagttcgagaccagcttggccaacatggcgaaaccccgtctctactaaaaatacaaaaattagctgggtgtggtgatgcatgcctgtaatcccagctatttgggaggctgaggaagaagaatcacttgaacccgggaggtggaggttgcaatgagccaagatcgcaccactgcactccagcctgtgtgatgggagcgagactccatctccaaaaaaaaaaaaaaaaaaaaagaaaggcaaaagaaaaaccttccccatcataaaaggacttaaggcataagcgttccaggacatcttcctgaaaacactcaatgacaaaacaaggccaagcaagaaaaattaagtattttagaactatggaacaggatgaattaatctgtgtaaatacagaatcaagactaaacaactctgtacattaggattctgaaatcaactgccaatgatgctatatttataatataaatgtataataagatgaaattagtaactagagggggctaaagaaaatacatggctgctaatttattcatatttcatagcaggaaacccatagtgctatctaaaattaccatgtgtagttcaaaagtgattctaacacctcaacgttattataatttttttttagtttagacaaatctttcagcaattaatacttcttatggtaaagaaatattcattggattttaaacaattccttcacttttcctttactgtcttttcttctgttaaattcaagtaaaattcagaattttcattaattaagaatgaatgaatgaagaattaaggattccattgtcatagttactccgtcagtccccatccccaccccaggcacttttccatacctccccttgtgcctgccttaatctcaactgacgtctgtctggttccaccttcacctgtctctacccatgcctccctccctcttgcttttctgcctgcctgcctatttctgtctgcctattggtctatacctgcttgcttatttccatctctgccagctggcctatctgcacccacctgtttgttcttctacacctgcctgccagtttgctgatgtctatcagttcacctgtacacccccctgtctctctaccagcctgctttctgtctgtttataatcctttcttacccatctcctctctgctggtgtctcatctatgtagctagccaggccccagccatatatacacatatagaaagaccagactttcttctaacattaatggtggtgtttcgagggatttgcttttgctttctcctctataattacatatacagagagactttgtttatctaatgaacatagattttttaataaaaataaagctgtttaaaataaaatcaaccaataaaacaacctaatgaacaaacatcctttagagcagtgcttcaaacttttcagatcatagcctaagtaagacactttaccaaaggatatatgcatttgtatatatagtattgtacacacataaataaattagaagtttcacaaagaaatagtaatccttacaacttgaactacactgtgaaatatttgttctattctattttattctgtttcattgtttaaaaaaaatactagttttgactcactaagttggtttcatgacctacgaataggtcacaacaggtagtctgaaaaacgccaatgagaagacgagtttacagtgaagtgacccagtgaccaggactgcctacacgaagcattctaccactgcctggccttcctgctggggatggcagcagatgagggataccctgagccttgtcctacttcagttactgtctatttccaccacccacattcaactcactgaactacccagtccaaggtgacccacaccaggtggttctttagcctctgtcatgagcctctctgccccaatagctcaccagcatttattcccaagtcactcatggacatctgatctaccatctcacactgttctctgcagcatacacacacaccttatctctccactgagaatgtgcacttcttgaacatccattttaaactataataaccgttaggcttaaacatctgtgaatcttaatttaaagttgaaaaaacatagttattttgaaagaagtcacattttgttttccataaaagagaaattcatcattgaccaacagagcaataaaatgcaattgtaaaacccattcctcttttcccaaatgtttctatttcagtattttaacaacacataatacttagattttaaacttcacatacacagttactctttcaaattagatctggttaagaaaaattataaaatgtaaatgtttttaagcttcatgacactaagatgtctcataacttcagtcatatgtagtctatagtcacctcaatgatcaaaactacttcaaaattgaatttagattgggtttaatatttagactgaatttagaatttagagcacactattgccaggggtaggatgccaataacagatacagtcagaattatttgtatgataaattaacaattacacaataaaggtaaaaccacaacaatatagcatttatctgttgtctaagatctaaaagccttgctaatgtcatcttatctgatatgaagtattttcattcaagcatttaaaaatgttactatagatcagagtcagcaaaccatccagcctgctgcctatttttgtaaataaaatttttctagaacgcagccatcctcacttgttacatgtatctctggctgctttcttgctaccatagcagagtttagcccctgtgacagagacgtacgatccacgaggcctaaaatatttactagttggccttttgctttaaaaagtgtgctgacccctgctatagatgatacactccaggaccttgactatttcaaatcaatagttgctatggacctttcacatgtacaacaggagcatgaatatgacaacattaatgtagggaatggggtagattttaaaatcgtggactattacgataaaaagaaaagttgtggcagtatgatgtgtgcagtactacctagaaagggatgacacagaaggatgggagctccaaggagagggctgctaaccacagtcaaagaaaatggagaggaaaggagtgagcaaaactcctgtgtgacttgtccagtgactgtcataggaggagagggagatggggaacctaggatcattaaaattaagatgcaaacatgaatacaggtccctttgaagaagcagtcaagtcaggagaagaagttgatattaggggaaaaaatcagcccggctttggtcttgttatcattaagatactacaggaacatcagattggatggcacgtgggcattttaaaaggcaagtgtaggaggcacccagtgccaccttgtctacattgttcagtgacaatgtagacactgagagtctacacctggtttacccagtcattctgcctgattttggccatgtgattagttaggtctaaaagccctctcagtaaacttgtgccctgtcttccctgagacagacatctcactctcatgttggtgaatcatgatcccgagagggcacactttctgtgcagcagagggagggcccttgaagctgtgctcaggtgtaaccggcctctgtagcattgcattatgctttccggctcctggtgtggtatatccgctgccagtaacaaatctttcatgagtataaaaaatttgtttaatgaaattaatgtttttatttacaagtgaggtccagacaaaaggcttgactgggagtcatatgccacagtggttgctggcactggacaggcagtaaaggccccaaggaggcaagtgtagaattacagcagagacttgagccctgaatcttggttaacacctgtaatttggggtgaaacaaaaagaggggccaagacatgaaacagagaagacacagagagtgagaagaaccaaggcagtgccgggccacagaaccagaaaaaaatattttataagtggaatgttaattgcagactaaacaaacattttcttaagtaaaattttttcttcattaaaatgaaaatatggtaaaatctctacactgctatagattaggttgtgactttgtttttggttgattttttgtaatgaaagtcccagaagtgagagggccaaacattcactatctcaaaaacttgcctcaccataagaagttctctgtggtgcattcccgtcattcatatgtctaagactcttcttctcctcctcacctacaactggactctgccattcaagggcttaacctacttttcaggtctatggacaaaacaactattccacctcatatacacatacccaccaataggccacattccctgttttcaagagcaccagtacctagagtcaagtggcactggccacacgccacactccagacctgtgggagctctgtttgctgtgttgaaggctagtactgagtttctccacagcagcactactgacacattgagccagatagttctttgtcatggtgggggtgggggccattctgggcattgcaggatatttaacaacatccctggctgcgacccactaagatgccagtagcaccccctccccagttgtgatgaccaaaactgtttccagacattgctaatgtcccctagggagtagcatcaaacccagttgcaaacctctgatgtcactcacggccactaaccgtagcctgggcttctgacctcttctgtctccttcctttgctcacacctcttttcgtgtcttggcctctgctcctttctttccttttattccccttgccacctacctttttctcttgtgccataaataattctatcatattgtgagtgccacacgcctctgcagagtttttgcagaaacctccagctcctcagagagctccgtgaggctctgggaagaagactggactcttctttgctatgttcatttgttgctgggtattcaggaacggctttcttcccacctaactctgggtttactttgttataaaaacatgaaagtatttgtctcatgattttgctcaaatatagaattttccctccttgtgtaaatattttgcaacaacaaaatttaaaaatcacaacaatcctcacaaattaaaagattagagggatcgttctttattattcagttctgtaacataacccaactcaccaattctatttgttggcgtgttacaagtaaaagaacatgaaacaaaatcatttccatttcaagaacttgtaacacacacacacacacacacacacacacacacacacactaacctggtgaaatacttcattcacgaagttgacataacctcgtgttgacaagagaatccgctgtaccatttcatacaccattcggtgctcttcttcaatgctacagaggctggagttgctgagtcttcggtccgacaaggtgctgctgttagaatggcttttgtcctgctccgtgggcccaccaccatccagctcaggcgctctctcctgcacagcaccaccaccaacagtctggaagaaagtcagcacacttctcaatgatgctcacccccactcaagaacacctggcaaaacttcagtcttgccttgttttaagtaactctggttaccatcaatgtgcacagggtacagcaaaccaaaaccagcttgaagcacgataggctccagagcctgtacttaccaattttctaactaaccaacaaatccctcccaactcagctattttaagaggaaaactactaagctatttcagaaaggagggctgtgaaattttcccaatctaaaaggtttaatttgcattgtaaaaccacagaataaattaatgtgtaaaaacatttgtattatcatcacatcaggtctctacactttagcatttgctcctatggtcacagagattggaatattcaggggacttcttgcagcaacaatgctaggaggcatcatttgattcatatgactaagcggcagcttgacagtggagtgtgaagatctttaaagtgtattttatcagaagaatgctgatctgagctttatcctcagaatcttaggtcaaacataaataaatattcacaaaattttaaacatttaaaagactttaggcatccaaagaaatgaagtaattcatgcaatcactcacaaagcttaacactgatttctgctctcgtatccacatagaattaaaggtttactccaaacaaaatatacatataattttgcttcacctttgcaaactccattattacttttaagtgtcaaaaatatatagcccaaatacaactaaaatttacccactgtgagtattttttacaagaagagacaagatatgaatagtacaaaacagtaatttcagtaactaccaaggacagtttgaaaacaaaacagatatccaatagtaatctctagagaaaattaatggattatacttgtaataatttttctcttcatgccttagttactaagcctgtgtggcttatgaaaggcactgtcgcactgtaagatgtgctcacctatggaaattattttatcttttttacagatccactatcttccacaggaaaataaaactttattcattttattctttttctatctgaagcttcagcaggaatgactcaaggatgagtatggtacagaaagaagaggcccaaactaagtctcaaaaacttgcttctccacattcctaactgtaaggcaacccacgcaacgcacttggatttcacatatacacacgcatatatgttaatctgtaggacacagaggctagattaggtctaaagtctcttatggctcaataacctgtgactttttgacctataactcccattttccccacaaactaaaaaagaaaaaaaaaatatgcacatagatagcaaattaaagatgaccacaaattctttaacactccttccacagagacgtgaggcccatgtcccctccctttcatctacatggactgtatgactgctttagccagtagaatagagtggaagagacctagccactatcagacccgggcccaagaggctgacagttaacaattcccatctcttgaaacatttcactcttggagccctgagtaggcatatgagaagttcaactaccttattaaccagaaaacagaacaagaagtcccatatgagcccagctttcctttccaactgccctcatcaagtagcaggcatctgaacgaagtcatcttggaccttgcagaccaaccagtgctggtgggctgaataatgacttccccaaggatgtcctaatccccagaatctgcgaatgtgttaccttccagggcaaaagagacataacagatgtgattaagttaaggatgttgggatagaaaaattattttggattatccaaatggtcccaatataatccaagggtccttataagagggtggcaggaggataagagacaaagaaggctaagtgatgatggaaactgggagaaaaggtggtgtgatgcagggccacagccaaggaatacaggtggcttctagaagctggacatggcaagaacacaggattctcccctagaaccttgagaaggaacacagatctgccaataacttgattttggatttctgactttcagaactgtaagataataaatttgtactgtttcaagacattaagtttgtgagaatctgcaatagtggcagtaagaaactaacacaacaacttactgtgaggtatagtggcagtctctagaatggtagtggccatttctagggacagtcaactgcagggtatgatggcacagaaggtacaaatggctgtcagcccagcactctttctccctccctaccagaacctcagtcctctgtgtgcctcctcccatgcacctcaactgacttgcaggaagctgaccccatccacagtactagggaccaatctgttttgtggaggacaatcatgacatctcctggcccattcacacacccagctttttttttttttttgagacagagtctcgctcagttgcccaggctggagtgcagtggctcgatctccgctcactgcaagctccgcctcctgggtccatgcctttctcctgcctcagcctcctgagtagctgggactacaggcgcccgccaccatgcccagctaatttttttgtatttttttttcagtacagacggggtttcaccgtgttagccaggatggtctcgatctcctgacctcgtgatccgcccgcctcggcctcccaaagtgctgggattacatgtgtgagccaccgtgcccggcccctaattgattccaaagttccaacctttaagatgttaaaaaagctagatagtaaaagtagatgactcacaactgtgaagagtcaagtaaaagaaaaaatcagaagctggaagcagtggttaatttgctgttctttctacttctcatcatccagatgtacttttcaagaatgagctacttattttcaataaatacaggtgatggttttctgacctttttaaaccagagaggaaaggttacacccattaattaagacttttttgaactgagtgacaatcacttaagatgtgatgtaaatttgccaaagagcatgactgagtttcctacacataatttcatacagatttttgtctgcctgataagtgaataaaggtatctcatcatggttcagaactaactgcatttctctgactgccggtgaaatcaggggtccctgtagtctgccttctatgagctgccctttcatctccttagtctatttttcagtggggttgtttgtcttcttaccagtccatgggtactctttacatagcagagatattaactcttttaacagtcacaatgttacttcatagtctattgattggatttggccttctgtagtctttagacataaaaatctttcacttttttttttttaaataaagtcaaacctcatttcttccacggctactgggtctttctctctctctctctctttctttctttctttttctttccttcctttctttcttttctctttctctttctttcctcctttccttcctccctcccttctctttctttctctctctttcttttctttctttctttcttcttttttgaaatgggagtctcactctgttgcccagactggaatgcagtggcacaatctctgctcactccaacctccacctcccaggttcaagcgattctcctgcctcagcttcccgagtagctgggattacagacgcctaccaccacgcccagctaatttttgtattttttgtagagacggcatttcaccatgttggccaggctggtctcgaactcctgacttcaagtgatctgcctgtcttggcctcccaaagtgctgggattacaggcgagagccactgcgcccagcctactgggtcttatttctacctaaggtagtctaccacttcccaaatttagacactctcctggattttcccttctcttacagtctcgctctgtcgcccaggctggagtgcagtggcgcgatctccgctcagtgcaagctccgcctcctgggttcatgccattctccttcctcagtttcctgaatagctgggactacaggtacccgccaccacgcccggctaatttttactagagatggggtttcaccatgttagcaaggatggtctcgatctcctgacctcatgatctgcctgcctcagcttcccaaagtgctgggaatacaggtgtgagccaccgtgcccagcctacatttcttcattattttgtttttattgtagaccttaaataaatctgacatttgcttcagtatgttgtaagaggcaaggttctagccaactattccaataccattaattaatgattctttcttttaatcttgactgacatcctgtggggggatgtgtatgtgtatgaaggagagagagaaagagattgcaggattgcagatttgattagatgttcaatactaatctcagtctcattcctttgaagcaacctgtctggaaacctatactactgtctcttaattcctgaaaatcaaatgtctgtttaggtttgtatcttgatactttttcctgggactcaaagaccctttaagtttgaggcacacctttttatttttttttttcagttcagataaactcttattatttgttcaattattctcattctcttcttcttccacccacctaatatttgtaaggtagggacctgtacttagatcttgtctactaatttctgatttcgaactctaagtttttagtcactgtcatgggatcttttttcagaaaactaatttttttcccagcaataatcattatcattttcattttatttgctaattttttaaactaagacatttaaaggtttcttaaaactttctttcagcaagtctttcattgttcttactgtaactgcacctccctcagatcttaaaaataagttctcctctaactcttcagtgacttctccccagtggagccgcatgctctagactgtttggtgttcctccatcaaggttcctaataaccttgaagcacaagagccacttatctgcctcctcaggtctgtgcattctttcagctcaggcctaggtcggagttctgagacttctagggcatcggcaaatctgcagtcagtggaccagacttcctatccctgttcttggggacaataaacaaaagagcacacaacaccatgatcccttagcgaagtggctgctctctgacctccacaaatggtagtgctccaccaagtccctaagtaactcagcctgttgggaaagaccccaattgtgtatggctgaccaaggccaagagagaaaaagcacaacaggccccacacaaggagaggtctcttctgaaggcctctgggaagaggtgggcttctcttctaggggccccaccattgctcaacagccagccccaaatcctgagctgctgatctacttccctctcctgagatgccagagggtgctcggcagcttcacaggtcctttccaggggccacttacagtttcctaagtgccttccagctactggggcttggtgaaagcaagacaggcctctgttctcatgctcagaggccactggtactcaagtgaggagaatgaggaggagccaggagtgtgcacacaacagctatcttctcaaaatggctcccgagattgcatcatcatggcagtcccaacaatgcacagcaagtgattcaaactcacaactccctctgaaaccttggcattacagacagggtaggccaataaaatcacttacctataaccaacaacttgtaagaaccaataactctaacaatcaataactttggctatgttccagtgtattttattacacaagcattaacagataaaaagatgatggatggcatacctggatgattttaggcaatacatcaactccatttttagtgttttgtgttgcagttagatactttttttccaaaaagaaggttacaatccacttaataaaaacaacacgagctgccatatatggaatctttgtactgtaaatgttctcattgtctcgagtggtagtaatgtacacaggctttggtctcaaatgggggatgtctggtagaagaaagaacacatgattgattaggttaataaatcataacattaagtaatccctacaaatgttttggtttccaattaaatccaatttttggttgtctaaatagcaactaagaatgaagaaccgcaattatttaaaatggcatttttttggtaggctcctttctgattccgccttgtgatctgactgagaatgagtgatgatggtgattgtttatgtatctatgatatacagctatggaaaaactaagctaacaactatttttaacaattttgataaattacatgagactataatagtaaacatcttttcacatacattatacctaatttaattttattttatagctggaacaaatgtaaaagtatatatgaacttttaaaacatcattttaggtattttaacatctaacactgcagtgattaaatccactgaactttagaggtttatatccttttccctttagatgaatccaatgaaacagaatcaatatcatctactttatatttaaaagaattaagaaagtcacatttcacctttgaggcatcaaatgctaccttttccaaagacttaataagaagtcagtttctcattctttaaattccataatcaatatgaaaattatatggtattggatttgagatactacttgccataagttcaactctctatcttaataatttttgtatatctggaatacctgtatgaggcagaaaaatgatcaacaaataacttttaatctaggaatattaacaatataccatgtttttaaaatgaatttagactacatataaaatcagaaacaaattttgaaaaaatattcacatatatatagctaaagaaatacatgtcccagtgcacctaaaagtcagtaattctacatctttcaaaactcaccaagttttggcttctctccccgtgtgtgtgtgtgtgtgtatgtgtgtgtgtgtgtgtgtgtgtgtacgcatacatagaaacacacagagtacagacaactgaatcaggtgaccatgttccccaaaaaagtaacatctcgtgtcaccacttcccctccaaaactgtttttaattattcatttgaactagttttacctgttttaaataatagggagaggaagatttgacccccacctttaccactctaagggatgcttctgtcctgtgagtcctcattgcttacagaagaaaaaaacattaggagccaaattggaaattcctttctgtttcctagtcctctggggcttactgtccatagcttgtccaatcacctaaaatttggttctccataagcacctgtcagtagtagctgctggatgcaggacccagcataaaataaaaggcatacaatggcagctgtttgccttgggctggcctccagtcactgagcaaagcctgaggtcgccataccccaccacccacaaggaaagacttcaggaaatgcagagatttttacattaaaagatgacaatgtaattataccaaaaatatcataaatacatttcaaattatttctgagtataggagccacggttcccttttactgctgtaagctgaggtatatcttagttggtacaaataattaaaatcacttattaagaaactttaaacatttaataataaagttaccattcaatacaaaaataaaatgactattttactttaaaataatcaaaggtcactttgaaagagactgcatagctttcctttggatatcctctatacacggctccaacagtacttaccaagtacaggtttgtagatgtttgttaacttagtaaatgatggaaataaatgaggaagataatactttcgaaacaatgtaaaaagaaatttaaaaccagtatcttgattctccttattcttccactccaagctcgcagcctttggataatatgtggaaaagaacatatgtatatttatatttcaaattaacatatactaaactgaagtgttgttatgttactaaaattcctaacctaaatgtaaaaaatgacaaataatattgacaatcatgtaatgaaataataacaaagctcaaaagatggcaggaatgaatacttcaaaacaaaacagtaactatgttaaaaacagcatttttacttagaaccaaattgctcaatgatatcgtatcttttataacgtgctgtaatgtatcatgcccatattttttctctacgttttttgtaattatctaacattccttgtgcctttaaaacatttagtcacaaacaatcaggtgtttttttctaaactcagaaaaaggccatttataataaatagaaattaaagaaacaatccctctcaagaatttcaaccaatgttacctacatgtaaaaccaatatcaaaaggcaaaagccatggaatcttggaaaatgcattctccgtattaaaaaaattcaaaggctacgataaaccagacatgccagtccactatggattaagtttaaatgtttcattgtgttgagataatatcctccccctcaaaaacccatcagtgtttgcatagtgggagcactccaaaactgctcaatagctgggaccgcccctcaggagccaggaggacagcctggttacacaagtgcagtcacccccaacatgacttagggaaacacagcccttagataagacctgttggtggttcttaatgcttgttagaccacagagcactctaaagcagggcttcccaacttccttcctgacatgcccacttagaaaatgaaatttgtgcagcacctgaggtaaagggatgagatgctttggctaccgcaggggcagcggggttcagcatccataacctgccaaaagctgtgctctgagaactcatctcaatcgacagaagagaaggcagaagggaggcacagatatgcacctaaaactctgcacacaattaggaagttcacagtctgcatgcaaacctctatcctatatcaattccatccgccttatctgaggtcacacaactcattagtgacacacctagaatgagaacccaaggcccccaacacaagttctggatactctgttgattttccaggataaactgaatgtccaaacacttctgaacagctggcatttgagatgcatctagaatgggccattagagttcaaatgtggagtttccagaatatgaaagcatgccccagtcaggttctcaggattgtgaagtcctgtgtttctgttgctggctaaaggcaaaggggcaaggaaaggggacaaaattgctaagtattcagaaagagcagccaagtactgaatcttgagagacagcagagaaaagcacagttccctaaagaaaactagaaaggagtgaaaggaagggaggagaattgccagagaaaatatcagaagaggagagaatctcatgaaggaggggtagttaaatcccctcgaagaatgaggagagcaaaacctgaagtgtgccctccttctgggctgaccctagaacccttgtggtttggggcttgccactttagcagtgacagggcagaaggcagctaacagtgggtgtcaaaagaacatgaatgaggatgtgaactcagtagagattattacttcaacaactcggttgtgaaggggaagacagatactggacaatacccaggatgaactcaaggacaagagaagtatttgctgagaaaaaagaatcagtacattttattctaactattattcagaaatctagaccaggagtcacaaatctcctattaaaatcataaaccagttacttcagttctgtaggcaattggtgcatatgagaaaaataatacatgacataaaggaggcctgtgccaatggcatgaggagattgctccatgtgcttcccttcagatcccctggtctgctctgcctattcctgtccacctgttcagcctctgggcccgcctcctccttcaacctgtcttgcaagcatagagattaggggtaggaaaggagtaaagagagaaaaatggtttaaacacactcacaaaatagtacatacagctggtcttgctgaagtgacctaaaaaatggtacacactctgcatttgctgaaatatcacataaaatcacctcaaagaaaaagaaagaggaaaaatatagatacacagagggaaaagaggcaatatttcctcttcctgctgagaataaacccatcactgaaatagtcataatttttctctgacctgaataaccatatacttcaacagtatttgaagaaaaaagcaggtttggtcctcagcaatcttctcccctgatatggctggtaggagtggagtgatttcttctggatatatctttactgaaaggacagaaaatgatgacagctcattcaccaaagttaaattttaaacagaatttagggttttaaaaatggtctctattaaaatacatctctccatccactgaagcagctcacactgaggagcacactccaaggcagtgtgcataaagggcctggaaacacagcccagatgcccacgaagcgccttctcctgctgcaccattctttcccgttcaaattctgctttggtcagcccaagatcaaatgccagtcattaagcaataacgcaatatacagtaataaatcaatggtcctaacaggcaagttccttgaaaactcacaggacacaaatgaccaccgttaatagtcccatgaggccactattgtccttccatagatgatgcaggaaaatacagtggcaaaataagatcctggtgagcagatgaatgtccacttacgaacaacagtgataagaacaataaaaacaatagctttggatggtggagtttaatctcattaacagccagaaaaccagtccagacttcccatgtgtctctacttcgtgctactgccaacatctgtcccctcctattcctgcttccatcacttcagtacatttctcctgttttcatttcatataaaataagctccaagtcttttgattctaaggtatgtaagaatctacagtgaatatgaaaggggaataattcctcttcagactccatcaggatttctattcaagaaaatgaaaaagtaagaattcctcaatgtaagttcaagagtaatttcaacatgggagatctgctaacataacttaccatcagctacactagggctgggattgatgagtgtctccagtgtgcaagggcccctggatgacatgactgctgggaaaccaggcaccaggcaagcaaaaatcagaacctgctcttctgcacagtttgtctgaagtgcttgaagccacagaagaaacagcctgattccttcacatcttatctaaaacaaaattaaaaacaatgaaaatgaaacacatgtatttacagaaatgcattacaatgtagcatcggtcttgagaaagaaaaactacaagttaaaggtgtgttaagtagtaaaccaaattcttcacttagtgacaaataagcaaagatgctgcaatacagcacaagagttaagagcctgggttctggagccaaagtgcctgggttcaaatgtaagcgctgccactttctagctgggacccatggagaaccacttaacttctccatgccttagtctccccatctgtaaaataaggatgataagacatttaccacaaaagactatgataaagactgagttaacatatgtaaaccaaataacacaatggctaactcccagtaagcactatgtaagtgtttcctgttaatagtatcttattctgtaaggcaacagtacccacggcctcaattatccataaaaacaatgacaaagataatctccctccaaatttacatgtgctatcactataatatgccatgttgataatgttcttgagaatcagaagatatggagctaaataacctcaatgagacagagcagctcttcttataccttatgtccctattctatttctccaacacctttgccatgctctgaattgccagcatcacgctgtaggagacatctacatagggagatgtgtcctttttctttctttacacttcaaatttatcccattcctagaattcaaaagcacatgtccctccatttctgtattcctaaataactgaaaagattatgtcaataaaaaaaaaaaagcaaaagaggttgaaaaaatgtcacatgcagctgaaagatgtagtgagctccaaatgccagcaactggagtgactgcctcatctcctttcaattaattcaaggtggtgctgactccaccagagcaagaatattgcaagtcaaacacaaagctttgccagaaaaccaaaccaaaaagtggagaaaagcctaaataaataaataaaaatattctgctttctcccaatagaagccaaaatacactaggacagacaccccagctggtgacagtactgccccattaacggggtaaattcacagtgtacttccaaacacagtcctggactccaccactgttctgcacaaacctccatgcccactcacacctgtcctcctctcccaagcaggtaaaatgagtggtaacattactattcagccatcagaccgagaggggaggggaggggaggggaggggaggggaggggagagaaggggaggggaggggaggggaggggaggggagggaagagaaggctctatgtatatcttttttctttttttgaggcaggggtcgggggatggagtttcactctgttgcccaggctggagtgcagtggcatgatctcagctcactgcaacctctgcctcccaggtggaagcaattctcctgcctcagcctcccgagtagctgagactataggcgtatgccaccatgcccggctaatttttgtatttttagtagagacggggtttcaccatgttggccaggctggtctcgaactcctgacctcaggcaatttgcctgcctcggcctcccaaagtgctggggttacaggcatgagccactgtgcctggccagctctatgtatatctaatcaaattatatttaattgaacaagagggaagtttctatgaaattctaccacaagtctccaattgttatatgttaactgtatttaagagaactaaatataaataagggtagttataaacatgagattaacaacctgataggttttaactacaagcctatttccttaaaataagagggacaaaatatagaatctacagtgacgctaggaataactcacttcgttttttttcaacatgtaagaaatagttaacatatcaagttttcagaggctgtgattgtttaagccaatgtaaaccaaccaatatattagcttattaaaggcattcgcacaacttaattaactccaagtgaattacctttcataaaatattcatcccaggctgaattttttctgccatttatgttttagggtaatcttatctcagcatcaagaagtatatgttataataaaagacatatccatttcaaaataaaccaattttaacctataaatctgccacaaataaatattcaagagtgagaccctgttgttcttttctcccacaatggctctcacaattagtaaaattaattagagacaactataattttaacaaccaggttaccaagatggacagaatcaagcatgtgagctctgaagcttagagggcgactgcacttcctttttctgatgataaaactggagcagtcagtgccttgcccatggtccctacccatacccagcagaatcagaattagaactcagaactctaaactctgaagcccaacccattttctcctaatactatttaaaatgtctctcgcaataagttatgatgtaagaacaaaaccctaacaatataatttctcaattaaaaattaaaactaagtcaagtggtttctaaagatcttttttccaaaatgccctaacattgttactttgtggcattaacaaatttaagagtaataaaaaatgtcattacacaataaaataaataccttaatagaatttccagtgtgtagaagcttctttaaagttgagcctgaaagtttaaaataatgaattataaatagagtatataaatgcatatcaaagatctattttaagaaaatatgtacttatgacaaaaatatactttttaaaaataaaaggaagaaggctgaccttcagaagcaaagcaatgtcacagagggaaagacgttttcaagataaaagtaccttaagtatgtatctcttcagaattcttttaaaacagtcaaaatgactgatattaaggtaagccaaatgcccacagtggattatgcgcatatatctcttgtcatgcataaaatggatgcttttttttttaatctctaaaggtaaaaataatgtaaaacaattgctcacaaaacatttttacaagaacattttacaaatacttagaatggcatgtttctctcctggcaatgacaaccacatttatggggtttggtccatcaataaatcctctagcagagcgctttggtcactgtcaaggaggcagaatcaaggctgactcggaactccagtcaactacaaaaactggtgctgcagcccactagaatgagaaaagcttctcttaggaggatagaacactattactaagtcttctataaatgtattcatgacctcagtatggagatggcaaccccacctaaatatcttatgtagcctctaaaacgggatcttaacctcaaaaaaggagatgatcttttaaaacagaaatatactgaaaatctgaggcaagagaactttcctctcagtcaaatttcagatcctttaagaaaaaaattacttagatcctctgatgaaaagtttgtgatagctctttaacaactggatatcaaataatatttactccaccaatgaatttcatagagctcctctaacaagagagccagtgttttggcaactgatacaagccacagctacattgataaatacatatataataactaaatgcatactctttagaaattcattagccagaaaaaaatcactggcaatccgaaggaaccttttagaacgattctactgttcataacaactaacactagggcttggaggaaactcatcatcatgactcaggctaggttctagcacttaaataactaatagtttgtgcttgagtgaatgaagcgaaagtgtctccccttccccaacttctcccttcacaaaactgtatccagtaatttttggtctagagccaacatttactaggctggctctctctgtcacagctaaggttcaagtgtccatctagcccacacctttcctcaacctggggccttgttctttgtccccatgttcatccattcttggagagtttgttctaagtcagtttaacatctacttcattacaccttatggtggctggcagagccaacagatactagacctcccaggagacctaatgataaagtctgcacagacagttctctttccagccatctggctaatccatcatcttgcaacatattcttggaaatactttctcctggtcattgtgtgtgagcattggtgcttgttagtccttccccttgttaagatgggtctggcttgtttttggtggtggtggtgcttttttttttttttttttttttttttgagacagagtcttgctctgtcgctcaggctggagtgcagtggtacgatctcggctcactgcaacctccacctcctgggttctagcaattctcctgcctcagcctcctgagtagctgggattataggtgcataccaccacgccaggctattttttgtattttagtagagatggggtttcaccgtgttagccaggctgatctcaaactcctgagctcaggcaatccacccgcctcggcctcccaaagtgctgggattacaggtgtgaaccaccgtgcccggccgttagtgttgttttttaagtatttggactacctatagatgcctataaccactgttctctacacacagaggagaaaaatacatatagaaagggcattacatgcagacatatagaacacatgacccatattggtcaatggtcccaaactttttaaaatttatctggcaatttgttacagcagcaacagaaaactaatacatatgtatttgatctagtctattctgttgtagtgaaaaactcgtttgtacatgggaagcagtacagcttagcagttataagtcagattcagaagctagactgctagggttcaaatctaggttctgcatttattaactgtaacctaagttagtaacttcatctcactatgcctgagttctctcatctgtaaaatgaggtgacaatagtacttatcagacaactgacagtgagatttaaacgagttaatacatataaatgcacagaacagtgccgggtatgtggtaagcacattttccacacaggacagggcatcagctattctctaaggaactcttttttaataataaaaaaaaaaaaaattagcaagaaaaacatgtgcagtggaggcacatagcatgaggactggtaataagtagctgagaaccttgcttggcctctgtagggctttttttttttctttttgagatggggtctcactctgtagcctaaactggagtgcagtggcgcgatctcagcttactgcaacctccgcctctagggctcaagtgattcttgttccccagcctcctgagtagctaagactacaggcatgcgccaccatgcctggctaattttttgtattttagtagacatggggtttcaccatatggtgatccgcccaccttggcctcccaaagtcctgggattacaggtgtgagccaatgcgcccagccctctgtaggtattttttaaggccttaagttcacaaagatatttctactttaacattatcaagtcatttctcattttgttttaatttttaagttcctctatatatgtcatgcctgtttggatttttaaacttcttattcaaactataattatacccaccccacctcttctgtgccttgaccatgggaataactgaaagaataagtaaataagatctaattacttgggctgattctatgaatttctaatttctattggctaacttttactacattttaaccataaatatcctttgaatgtaagtcttactacttttgaagaggcagtaaaaacgtcagggctgcaactagtgagagaagagtgtagattctgaaaaaaatttaagggatactaaaaaactcattaatcaagataaatattttcatgcaatggtttttaaaaattgcattttaaaaaatgcaaagaatccataatgaacaatattaaatttttaattactaatgttccgctgaaccatataggaaccagagggaaaagaaaaagggtatacttctgtatgtgtgtttctatgtacttttaatttttttttctcgtgcagaacattaaagtagcttaaaaatgtaaaattggatgtattaaaactcacagcattagtttaaatattttatttataacaaagaatgtattataatattactttcctggctctgaagaaagcaaattcatcaataatattttcaaaatctatttctttgcttctcattttagattgtaagaattgtcacatttgacaatttctctttgaacaagtaacaatcttttaaagatcttttaataatatttttaaggccaggagatcatacagatatttctcacctaaaactttaacattataaaatcttttcttatttagttttaattttttaaaacctccttctcaatatcacacttcaaaccaaattacacacaatgcagtacaccatcagcatcaaacaagaagcaagaaagagagaaactccctctgggctaatggtatgccaagcctgctagaagaggccagtggaatacgaacagagaacttcctggcactacaagatccacactaagcatgaggaaccagcattccactaaaaaatttgaaattaacataaattagctcaaaatggatcaaagacctaaactatagaactgctatatgaaaacataaaagatctttgtgactttgggttaggcaaacatgtgttacacatgacatcaaaagcacaatccataaaagaaaaaactgattaactggatttcttaaaaattaaaaacttcaacttttccaaagacactattaagggaatgaaaagacaagccagaaatggggagaaaatatttccaaggcatcaatctgagattttttttaatgggcaatagatttgaacttcaccaaagaagacaaagtaatggcaaataagcacataaaaagatgcttaagattattattattagtcaatgagataccactatcactaaaataaaaagactgatcataacaaatgttgaagagaacgtggagtaactggagctcttatgttgctggtaggaatataaaatggtacaaccactttggaaaacagtctagtagttaaacatacactgttacatggttcagccattccactcccaagagacaggaaaccatatgttcacacaaagacgagcataaatgtttatagtagctttacttataatagccccagatgctagaaacaatccaaatgaccatcaatacctgaataaattatggaattatgacatgtccacacaatggaatactgtactactcagaaattagaaggaatgaactattaattcatgaaataatataaataaaccctaaaataattacgccaagtgaaaaaagccaaacaaagaagagtacatacttcatgattctacttatgtaagactctagaaaacgcaagctagtctacaagggccagaaaagcagatcagtggttgcctagggactgggggatgagatgagaaaagatgggagagcgggattaccaagggggacgaggaaactttcgggggtagtacctatgttcattatcttgatggtagtaatgatttcatatatgtatacctatgtcaaaacttatcaaaatgtgcattttaaatatatgtaatttactgtgtataaattgttaaccaccccccataaatattttttttttaatataagaaaaaaagatcaggcgacctggaagtgattgggtcaaagatcaggagaatggaggatgtggtcaagacagagatcagtgtctgaagccattgaggcacagaggattgcggtgggggttgatgggtaacttggcatgaaggaaaagggctaggagagaacaaagccatgggggatggggggaaggcaagcgagcaggaggtcaaaagacatggcagcaaccaggaggtagaagatggcatgtaaaagggacagaggtttccacagagggaatggtggctgatgtctagaattggcatgggagaaaagaaagaccatgatctcacccccactcctgagggagacagaggagcttcagacaaaagtcaggtttcagatggtcagggaggtgaaagaaagaggctgaggtttcagggctattgtttaacgcaagaagaggacccccccagagggcaaaacacaaagaagtgcctgggaggggaagaagcacagagcagtaacggtaaaagcaccctgagagggcatggaaaaacaccaggtgagttggcccctaagctaccaggggcattagttccagacatctcctgctgaacatggaggcaggtggggtccctgatttcacccagcctggctgtgatgcacttctgagggagtcctgtgtgaagtgcacagggaaaccctgctctctcaggaagagtgaggtatggtatggtctgaatgaggggagcagggaaagctgccagactcaggctcccaaggaaaagttaggacccagtggggagtagggaccttgagaaatgagactggtcagaggctatgttcacatcccaggcaatgtggggccactggttagtcccaggcccaaagcctggaatacacttaaaaagcaaaaaacaaattttcagcttagttaggcctttggtttttacattatgtatataaaaaacctaggtgaacaaactagatttaataatgactcataaaaaacatatgaggtattgcacatatgtgaattttccaataactgaaccccacccctttaaacctagggattattcatttttaacattttttatataaaacatctctaatacaaaatatatccttctgcctacctgacaaataattattgagttcgggcacagcactgtacactgaatgagacaggaaacttggtttctagaggctccagagcagtaagccttcttaaagtcaacacacatataacttaagtcctgtgttgacgatgcgcagcctgcccttataccaaatatccctggtttgctgccagtgcgattctttgccattgcctcactctctatcagttctaattattgcccagaaatgagatgtcaagcagtcacctttatccaccatgatttactggcctaaaaaatgacttcagaaaaaatttgataaacaattttttctttcgtagtcagtaatagaaattgacaaatagttgagttgtatattagtgtacaatgcagagctcatgagtattgtgccaaccactcccctggtcatcttgctgtacaaacatcacttgaagaaatacctccagatggaataatgaacccatgttcatttcacattgcaaaacttacgagttcaaatatgtttcctcattcaacgatttaaagcaaggagccagccattaaaaaccaaaacaaaaaccgcagattatcccttccctttaaaagcagttttaagagaaatagaatgtctctgttttctacagacaaaataagatgacatgataagaaacagacttcaagcactgtggtggttgatgtttcaaactattttcttccttctcaggataaaatgtggctttcgagactcatagaatacagcagttgcccttattttaggtttctctgcttagagacactgtcatttgcagtgtgggacaagaagcataccgcatcagtggtgtataactacaacttcaaggttttaacccaacattttagaataccctgtcccccaccagctgcagtaacatttaattagtaagacattagtataggagtgtcctccctagtaggtaaggaatatttgctacctagaatatcagacactggttggtgagaaggcccctccttgcccaagactcagaagttttgtaaaagtcaggatgccaatgctgaggacatatttaaagcatattcctttcctttgatacctggtatttccctatagtttctaagtttctacaacaactcagtcaagacccggactgactaatggtaacagttttaaaaatccaaataaactggaaataattcaataggtacagtgaggtatatatgtatataattacaaatccataatctcttatggaccatttcaaaatccaaaagattataggaaaactgaagttcttctgtgtaagtcattagtggacagaacctaatctgaattcatatgcctgcaacacccgaataaggctatcttgtgtgtagatattccactaatggtacatattcttatcttaagctatagaaataataacttgcttagttggggccgggaggagaaggcgctgcccaggccactggaagtgttatgttaagattgtcttgatgttctaatttatttgcttcattgtacatcaacgcaccacattgtcattctaaaatctgaaaatgcctgattccaaagcacatctagtaaagatcactgtagaagcgatgtggacctgtgtcaacaccaatttccacccaatatgattattatgcaaaaatatatttgtctgaaaagagcctgtttgactttaagtatataagcatcagtaataaatgtggattattttacatgcaaatgctcatatttcaacattctgaaatattattcattctgaccactttacagcaccagcttgttctgcacaccagataaacaacacatactgctattagatggctcaggaaactcagtatttggcaatctcaattgaggagtctgaggcctccagtcattgttcttgctaagatgctgccaaactgggtaaaaagctacttgtaccagcaattttaaccagtttatgtggtattaggcagaattaaaataatactacacactgcctactagacacatagtttcacaacacaaatgcaaattaattttcacacatagtcctaataagtttattcatgctgtgaagagcctactaatcttcagacattctaaagtgctatctaaagaaaattagcatagttttcatacaaatgatataaacaaaattgaagaaggattatatgtagcacagataaaaaatactgcatgcagttatttctcattgtcagccattcctacggtaccatggagcaccacaaatccccatgatgtctctttggattataccttacatttaaatttttatttttactttaatttaaaaacacaagctgaaagtctcaattaagcagaaatgcaatggagaactctctaaaatttaaaggaaaactttctttgtgtatttgaaatatttaaagataaaggcactatcttaaagtaatgatttacacatttggttcaattgacatatacacttttttaaattaagaacatataacttcaaataattcagtttctataacagtcaattcaattttaataattgaataatcctaaatgaaatttaggatttagaattttggaatatccactaatcatgttgcattctttcaggttccacaactttgtacatattgatctcccacccagaaaaccctttccaaactgcacctgttcatctttcaaggctcagatcaaagttacctctcttgaagccttcctcaattcctctgaacagaattattcaacttttcttttttgttatcatcatacttctttcatagagacaattttgctgtaattatttttctcatctatcccctgactgggcaaaaggcctatacaatacaagaatggtgatatattcttagtttctgtcccagaactttgcacacaaatgtctctccctcaacaaatatttgaatgaatgaatgatcaaacagagttagattccatcataaggtcacactctccacaaatacaatcatctggtaagtaagaaatcttgtaggacatgctagactcttgtacggcaggggattgaaggagacactgtttaaaacggaaggcagaattcacgattgatttcccagaattactccagctgtgctgtgtatattcaagtgggatgagatgttagaggttaaaagctggacagaaaaggcagctgtggtaatttgctttatttcaagtttcctctcaatgccacatcctaaagcattcaaagagaataattttcagtcaatgatacaggcttaaagaacaagaattctcttggctgggcacggtggcttacacctataatcccagcactttgggaagccaaggcgggtggatcgcttgaggccaggagttcgagacagcctggccaacatggtgaaaccccatctctactaaaaatacaaaaaaaaaattagccgggcatggtggcgcatgcctgtaatcccagctactctggaggctgaggcaggagaatcacttgaactcgggaggcggaggttgcaatgagccgagatcacaccactgcactccagcctaggcgacagagcaagactccatctcaaaaaaaaaaaaaaaaaaaaaaaaaaaaaatacacactactgtgattcaggaggtctggctgggacctgagattctgcatctctaacaagcttctgggtgaggcttatgctgctggcctatgaactatactctaaggagcacacagaggaagagagagacatatttgtctccaaagtcagggttgaacttgtcttggttttcattaccataataccatacccttattaatattcctttctataagctatcttgatgatatcaattatataaaacattactgaaaattcaactggaagaaattcatattactaaaaaatttttaattgttcttacctatactctggtaatgccatcgaaagaaaattcgttcaggtagaaactgcagtattttctattaaaaaaagatataaagaaaataaacaacaaatgaaattacacattttcatgacaggcccatattactcactgtaggtaagttctagaagaggaaaaggaaactatgtacaataacataaatactgcacttcatgctgtattcctatgagatagtttctttcacttgccccaggcaagctttcttacctgaatgttttaaagagatcactgtcccaagtttaattccctccaaaagaaaacaagaaaaaacctaaaatgttatttttatcttaattaaataatagccatttcttaaatattaaaataaaaatttcccaaatgacagattccccaggtttcttctttttcaccatctccttcccattttcattataatcactattagtctctggacaaagaacaggattgggaagaaaagtgaaaacaaagagaatgagactgtaaacaactcagtgagacaagaaaatgaaattggtggcaagaatttcatgaaattaatggccaaaaaaactaataagttttagaattatagttaagaatatccccaaacttttacaaatttgacttttgtagattccatatatatgagatcatgtagtatcttttttttctttgagacaaagtctcactctgtcgcccaggctggtgtgcactggcgtgatttcagctcactgcaacctctgcctccacggttcaagtgattctcctgcctgagtctcccaagtagctgggattacaggtgcttgccattacactcggctaatatttgtatttttaatagagatgggggtttcaccatgttggccaggctggtctcgaactcctgacctcaggtgattcacccacctcagcctcccaaagtgcttggattacaggcgtgggccaccacgtccagccccatgcagtatctttctgtgcctggcttatttcacttggcaacaatgtcctccaggttcaaccatgttgtcacaaatcacagcatttccttttataaggctgaatagtatttcactgtgtattcataccacattttctatatccattcattcactgatggacacttaggttgtttccatatctcaactacagtgaataatgctgcaataaacatgggagtgcagatatctcttctgcatactgattttaattccttgggacataaagccagaagtgggattgctggggcatatggtaattttatttctagtttttttgaggaacttccatattattctccataacggctgcactaatttacactcccaccaacagtataccagcatttccttttctctacatcctcaccaacacttgttacctgtcatctttttgataatagtaattctaacaggtgtgagatgacatctcattgtgatcttaatttgcattttcctgatgattagtgatgtcaaacgttttttcataaacttgttggccaaatgtatctatgtattcttttgagaaagtctattcaagtcaccttatctttcaagcccataactctcaaaggtatctcatatctaatgttactacacgataattctgacaaacactcaaacacacccacatgcattccaaatcccatttagtgaaaaatacctacacaccagacaacagacttcactcttgaaaaataaaataaatataaataaaatatgtaatccttccaagatttcatgaatagtgggcaagagagatgataaagaaaagaatatcagttagcaaaaaaaaattttttaaataaaaaaaaaaaccttgacagacgtttgcacgaaatattacagacgtaagggggaaagagcttcacctcagcaggggcttcatggaatgcttcctggaaatgaggacacttgagctgagacttagaagatgaattaaattcgcctagtggatagggacagaaggaatgccatgggagaatgttagaaggccaacacagcttggtgccttacaggaaccacagcagcaggagggtcagtttggctggtaggcagtgagaaggggaggagatgggcctggagaggcaggcgaggctgggggcttaatgtcctcatgggagcagtgtggtccctgaatgggttccagctggaggtgaactggaggcagctgagaggggaggtagacacagtcactaaagagaggcaatggtagcatttcagaggagaaataagaaggcctggatcaaggccggccaggtaaagagaacatataatagtgatatgcaggagataaaattgtcaggataagtgggtagaggggctgtagtaaatggaggtctccatggctcccagtggctttgtagatggcaacacctttatccaagagatcaaatccagatgcaatcttagacccgaggagaataagctgtcaagtttgattctggacatcctgccatttgaggtgtcaagggatgaccttactggaaatgttcttctaggcaaatgtgtaaatgggtctggagtacagaggcaggatttggacggtaacagatatgggcagcagctgaagctgtgtgtacatgagagctctcttttgagagagtttaaaatacgacaagatgaagctctggaggtatccgtgagctgagggagctctgctaagaaggtaaaatgaaggtaaagcaaaagccagaggctaatgtgctcgaatccaaggagaaatctttgatatgccagctatttgtatgcttacttattataaagattagaaacatttacgagtatttatatgcacaactagttctaaaaagttaaacatattagaaaatgtggggaaattgatgtcacataacagaatgacttcaatattaaataaagtgagctcaatattaatctcttgccttgagaacacacaacctttgtaagccagacaccaaatgccaggcatgacagatccatctataaattgtacagaagtaaactggctgtttcaagggaaaaaaaatcaaaataagtcttccccttgcaatatgctctaacattaattttagatggataacacaaaaaaggagctaaatataaaaactgggttgttatgttatgtcaagttacattacattaaaagggaatcagaataagtaaaacagctctctacagaatatcttaataagaacccacgtgagcattgtcttaccaacagaacctaaactcaaacatccccatgggcacataggatcaagaacccaagctggtttacaacctacaggaaaaaatcacaagcaaagagattagaacaagaaatgcaaagactctggaactgagaataagaatgagggtctcaggagttaggctgccaggccaaatgagcaactctagggccacaaacacaatctggagatggcctggggatcaccagatgcgagagatgaagacaagcctgcacctgcatctaagttagatcctctggttctttaactcaaactttctcttaacagaaaaatttactatagaccccaatttggtatctttgataaaaaattaatgataatagcaaggtgagttttctggaaaacatgctgcaatggaggagataggagtacaaatggcctactgaggactaacacctgtgaaagggaaaagacggcagcaagattagacaggggagcctcagaccacgaggcagagctgacaaatctctgccagcctagcggaagctccagagcaaagatgagaggagtccagtgtgaccagaaatggcgaggcccttgtactactgcctctggcagttactggcttggggccatgatgcaaagagtatgaccaaggatggaaagccgaaggtgtgaagagctggaaaccatcagctaacgccacttttgtagctgggcagcacattctttcttgaaggggaatatgtacagtccatctctatgtgtgccacaataatcttcaaattattaattagaatattctcatcacattggaaagctgaagttctaagagacgggccccctacttgagagacatggcttctctactggcagtttctcaacagctggctgctacctcacgttgatggaaacctggtcccagtgagttctccccatgctttctgtgcttccttccatgcagttcacagtgcctgggcaaacggcacagcagtaacttggtgtcctattatctcacgcattctcctttaagggacctggcagcccagctacatcccaggatcatattctgatcccatcttgccacttaaacatttcatataggaaatgctgagaaaagtaaagattcagaatagatcttagattagatgaatgcttgacatacccactgttcttcaggtctttaatttggtcaggaaactaatttggcagtgaaaatcatgctttttagttttccaaaatacatattggtcttcttgatttcattttcttttgttagcacacaacaaagaaaaacacagaatacagcaagacgatgtgtatctacatgcttagatactgtcagtctgccacaaaagtaatttccagcttattctgaggtcaagcctatcattatcaccacttctgggtaagttttcagattcacaaaatggatggactttaaaaacactcaaaaaggcttggatatgaaatgcatgcccagtatctgagctactaagaatattcccaaatagacaaaatcttacacaacaagtcaaaggctgaaacattacccacactgatgctttttgtacccaaatattgcaagagccattgtttaaagtctatgaggtcaataaaaataaagcccaacacaactatctatgtccaaatgctaagcctgtccctcagaaagccctagatgaaggctacctttactgggacaaatacaatctggcatttcttctactgcagccaatattctaagctatactgctgtgaatgccacataagctactgacatcttgtttgtagtttcactggaaagtaaaataagaaaaaaaaatcaagaaagccacacagtgtgaataaatattacttttctgaaaaacacacagctctatttaatgctcagtgctcagctgcatctatatggtaatccattatagtacactcgaaatcgaaattaggtattactactgatcagcacatcagggaatctgtcattcttttaactgattatccatagttcttttttcttcagaacctactgcatgaccaggaataatgtgaaatgtaagctggagtctacacaagatgctatagtctactttataactgctggtcttctgatttgtgtgggaaatatttttaaattattatcagatgactgcaacatgtcccagtggattcacacttgatttcaattccacttagaaagctaggacagtgaagaatgaagaaaatactacatactaactcatgggaaggtaatcaactacaataatgaccaactaacatgttacatctgaaagcagagtgtggggagcaacccttccccaaactagctgcaggacagaagagctctgggtaaagaaaatgctgaccgagaagaaaacagatttggtttaaaagaacagaggtcttagttacttgaccttttgaataataaatatgcagaaaacttatgatgagaactggactgttcggtttaaagaaaacattctgtgaatgcctgtgctacaagtatagtctgatttcagagggacccacgtgcatagcagcccagctgcatagatgcttccagggagacccatagagagggcaacttgatcatttgctgtcttaggcctggacactcatctcttactacaatgactcaactctttcatgaagacagaatatttgccttgaacactttctcattaacattataacaaaatgttatttgaggacctgctatacgtttaaagttaaaagaaagttattctagaactgaaagtccatcagccacatacctcccttcttcaatatatcctacacaattcatattccagaaaatatacagattaatcaaaataatccgaaaacaagggtgtggggttctaaacactgtgacagtgagctatatttacataattggagttaatatgactataaaaaagagtatattcctaaaacaactaacataagacaacatcctaaaaatattataataaaataatctgaatggcaacagcagcagcgagaggatgaacaagttatacaccttgaaagatgatgacactggggaccatgctcagaatgaagaaaacagcacacagaaagatggagagaaggaaaaaacagaacaagacaagaatcagagcagcagcaagaggaaagctattgtccctggaccagcagagcatcccctacagtacaactacactttctggtattccaggagaacccctagccatctcaccagcttacagagctacaaagagaatatcaaacagattggctgggtgcagtggctcatgcctgtaatcctagcactttgggaggctgaggtgggctgaatactttgaggccagaagttcgagaccagcctggccaacgtggtgaaacccagtctctactaaaaatacaaaaattagccgggggccgtgatggcgcacacctgtaatttcagctactctcacttaagcctgggaggcggaggttgcggtaagctgatattgcaccaccgcactccagcctgggcaacagagcaagactctgtcttggaaaaaaaaaaaaaaagactatcaaacatattgatacctttgcctctgtgagttctcaatgatttaatggagccctgacagttcactcatgcctgtatttatatcgtgatgtttatttaccttcctggtaacctatttaaaattctggtttccttagctgactgacctgtctgagagatcagatttgttcattcttaggtttctccctaaacattcctagttaacatgtaggtatcaacaaatatgagaattgcagagttgatcggaagagcataatacaaaagtacaggcctgttttttttttttatttaagtagacatttatgcagtccttattaagctcaaagtgccatggagaatacaaaagcttatagtacctggcatctaacctcatgaagtttgacagtaaagtgaaaagtaaagcttgaaagttttgtatttaagaacctcccattaaggttttggctgtgttcacgatcatgcataaaatacttttttcctgtgttcagaaggaaaatgaaatccctaataattgcttttgtgggtactgacagtagatagagcctagactatgtctcacctccctcccaggtgacttggtttgtgggtaccccaagaatctgtctgcaactaacaccagtcttgttgaacaaaggttattatgtacctcctgtgtgctgtacagttgatctttaggcagaaccaaatgcagggtctgtcattttcttgaaattattgaggtattagccctgtttaaatgtgtaaaaaagaaaagaatactctaataggtaacattacaataaactactaaagagggaaaaataatataaaattaataataatctgggtataaactgcttaaaatagttgagaagaagtacaaaagacatatggagttaaagtaaaagtatagggctatcatcgaattttgctttatttatttttttttgagacagagcctcgctctgtttcccaggctggagagcaatggcgcaatcttggctcactgcaacctccaccacccaggctcaagtgattcttgtgcctcagcctcctgagtagctgggattacaggcgtgtgccaccacatccagctaatttttgtatcttttagtagagacagggtttctccatgttggtcaggctggtcttgaactcttggcctcaagtaatctgcccacctcggcctcccaaagtgctgggattataggtgtgagtcactgtgcctggctgaaatactgctttgttcttgatattagaagaaaaacaatgcaaatgatattgttaattgaaagatagttattggaatgaaaatagaaagtgcaccttccaaattacaaagcatattccataaagccaaaatcagtgacctctcccccaaaaacaaagttagaagaaaagctaaaaccaagtgcaatgggcatcagaatacacagatgtgtactggttaccacacacaaaaagtagtaagtataagcaggttaaattcccctaccgaagaccaagtccatcagacccagctttcaaacacagaaagactgacaataaaatacagaaaaggaggctcacatgcacacacacccacacaaagcaatattaatatcaagtaaaaaagtattaacaggacaaagggaattatttcaaataggttaaatatgtaatttacgatatacctataatacttatgaatctttatgcaacaaataacatagcatgaaaataaaacaatggaggcatactccattaaaacaactttcagaaactaaaggggaaaaacactttttaaatgggggatattaacacacactatctttgagaaataaaataggcaatacagtataatacggaagacttgaatgtagttatagcaagactggtttaacagctatatatcaaacttcacagaatccaacatctatgaaacatttacaaagttattattctaagcgatgcaaataaatccctcaaagtaagtgttacacaggtcacaagcaaactcaatacactgggagtccaccatcaagagtttaagctaaaaaattctcaattatttgtggattttaaacactcaagttaaaaaaaaaaagtaattctcaattacttgtggattttaacactcgagttaaaaaaactgattatataaacgaaaaataatcaacattgtgattcgcatataacaaaaactggccaaagctgaaataagagacaaatccatagacttgaatttcctacaatgcaagaactaagttttaaactcaaaaaatagaaataaaaaagttttattaaggaagaaatcaataaaaataaaagcaaaaatgacttacataatgaaattatcaccaagtattgttaatcactaagctacagacagttgaactggtagtactgcaggtaattaaatatcctcttaatcaaacatttatttaattcattaaaaaatagtcttattaagtgcccattatgtgcgaggtaccatgtgagggatcagagatacataaaagacaccattcctgctctaaaagttagagccctaagagggaaaaggtgagaaaatcagggatgtcagtacatgcacaaggaaatgaagacagacaaggtgcacttccaaagggagaacacccttgaactgaatcttgaaggacaacaggggtgagccaggcaaggaagagcatttcaggcagaccaaacagcagcaaaaaataaaaagccttgctgcttatttggggacctgtaagaggctgccagtgagggcagaagacaggtgataagtgatagagaaggaggcagactagacgaagaacattctgaaggctatactggggagtgtgacttttgtcctgaaggcaatgagaatcgaaattacatcacacagcatctgaggtgagtgagggagagagaaggggtagaagattacaaaccaaaagactgcttagcaggatactccactggtggggaaactgaggctctgaacaaagtcttaggtagtaggcagaaaagagataaaagagcaccagcacaaaatatacagagccacagagtgaagaaaaatactaccaatactgaacaaaataaacagtagtcctcccttatgctagggagatatgtttcaagactcccaagggatgcctgaaaccacagatagtaccaaaccctatatacactgtgcacaaatttctttttccttcttcacaatttcatagaagattcattcttactgtagatcttagcaacctcagcatatagtttttttctttcttattaagtcaagaacgctcaccttttcacttaaaggaagcactgtacagcttctctttggcatatctgattgccagcatcactactcttgtgttttggagccattattattattactattatttttgagacagagtctcactctgtcacccaggctggagcacagtggcgcgatctcagctcactacaatctctgcctcctgggttcaagtgattctcaagcctcagcctcctgagtagctgggattacaggagcacaccacaacacctagctaattattgtatttttagtacagacgaggtttcaccctgttggccaggctggcctcaaactcctggcctcaagcaatccacctgcctcagcctcccaaagtgctgggattacaggcatgaaccaccacgcctggcctggagccattattgagtaaattaagagttacctgaacacaagcaatgtgataccacaacagtttatctgataaccaggaccactgctaagtgactgacagttagctagcatctacagcatggatccactggacaaaagaatgattcatatcccaggcagaatggagcaggatggtgagagatttcaccacactactcagaatggcatgcaatttaaaacttatgaatggtttatttctttaattttccatttaatgtttttggaccctggttgaccacgagtaaccaaaacctcagaaggtgaaactgcagataagggggactaccgtattaagtagtaaaatgtgatattcaaaatgttttttattaggtacaaaaaatgcaaccttcaaaaactggaaaggcagcacttaatagatttcaaggttattttttctctttgcttaggatcatgcaaaggtctaatctctttttaaagaaaaaaatcacactgcaccggactcctcatttttttaatgacggaacgaacattcagtgaccttcacaaatccccaaattagtagcatataattctacccataatatgtgggttttgccccgaataaagcattcactaaaacagattcaaaaggagtcttcttctcacaaaagtatcttacacaggagatctcagtcacaaccaaatctgccatgctattcttcatttcatgcaagtttctattttctgcctgaaaactactgcatttttccgatctcttcagttttggtactagcactagttggccatccgttttatgccatgttttaggggaaaaaatcactccaagacagtttctataggagtgatgagtagagaataacaaaaccccagtgagatgccactacttggttcccaccaccccataaattcagaggatttaaactcctgcctcagcacaattagaaagcattgtacacctgcaggttgtcttgggactggccaccctgtcaaattcattcagcaagtgcccaaggcctgcaggaaaagccagtgcacaaaggcttcaagccagacccttccaacctgtacagtgtcacaaaccacatcaaacactagatgtcactctgtaacagccaccacactacatatccaaacagaaaacaagtaatagacttataatagcaagtttttgtacaactctctcctaaaggtatatattaatttaaaaaaaatcaacttaccaaaactgcattaacagattaattttaattaaagagaaaaaagctctctacatgtctcctgctatcctaacaataaataaacatgctcaggtttcagtgtgaatttcccatatctttagccctaatgcagtttctaccatctgcccttaaaagattcttggaagcatttttgctagtattgccttccacaggatctcctcttaagagtgtcagttaccaacacatcaagtggcacactatgtgaaagaggccagcatgccaggaagctcagggcacctggactgcaacagataacaacaagaatgtaatttcagacttccacgaacatcttatctccagtgtcccttcctccaaggtgaactgagtaatttggtatatcccgttgggtcaatcccaagtttctcacctataagtcttgatgcaaaagggagactgcagtctttaatactaaatttgcatattaaactatccattgaaactgactcctttcaactcaaacatttgtctaattaaaattactaacattctataataggataatcacattttaaccaggaaaagtgcatgcaaagaatctccaaaatggaccacatgtttatattttgttcccaccttccggtttgtacagatcatagacatttcacaatcaaaatcagacaccagaataaccacatgctatagagataaaggatctcagtcctatgttttattatttccccagtatccagtacaggcgatagcaccgaggagcaactacagagctaattcaccaccacaggcaacatatgagaccagtgaaaaagggtaccttggccacctggccctctactgtgatccctgcagagcagtctcaaggcaagatcacactatgccataacaataatgttatcatttggagttgttcccaaccaagggttcaacatcaataaaagccacaagtatggctggcattacaaagaaagccagatgattacacacctctattatcatttaaatatagccccatgtcataaatgtgacccaaaatcttagtcatgctaactagagacattcactttgccaactggaactcagggagactttggggatgagagatgggtgtctttgtcagctcagttcttttaaaaatgttctccagaaaatctgaattgatagtggctttttctcaattgcaatcagtcatttagaattatgacagtgaccaaagagctgcattcaaaattggaatcattcttttaaaagaaaacaaaatctactaaagcatctaaatatttgaaatcctcaataagaacttaaattccaaggattttagaagaatctgcttttcttgttcattttagttgttcttgtccctcttccactcaaaaaccgtgaagtggcccttacaggaaacaaaataaaaagcagtatcagcctgagaggtttgtagaggaagtccttcacctcggcatgggaggagggagcagcacggaaggatggctgcacactggacagcctggaataagaaataacaaagcagagaaaagcgcagaaactgtggcaactagttaattgtaaaaatatgattctgccaccttgctatgtattatttgcttataagaaaagccattagccattgtataaagaaagaaaaggaatcgttacttaatcctgtaggacaccgagcctgaatctgttgacttgcctagaattcagttcaggcattttcactgaacctccacaggagcttttaatttgttttcattttcaaagagttacaaaagatatgcaattctcacaaaagaagaggaggaggcaggggtggggggaggaaaagaggaggaggagaaggaaaggaagaagaaaggaaataaatctcagaattgtttgtaatcctattatattcataactctagtttttctttaggcaattcactattagtatctgaagtaaaatggtgctactaaatgtgaaaagttataaatgaatgcatttggatgggaaataaaatcaacattcaaattactggattgcatatacaaaacaatgctacagagagtgaaaatcagccatttgtttcatcttattggcactgtactggatatagctatattactattatcaggaaaatcattaaaaattcttttcccctactctaaggaaaaaaattaggggctaaatccactatctatataagctcacctggagcaatgaagaacaagagacccagtgctgaattccattaaagtaagacatagattccactacatccctggattcaccactggtcaaattatgaatcccaaacataactacacccagactgtgcacatgctgagtccagccatccaatccagcataacaccaaactgcagagaaggaagggagtcagtacatataggcgtgtaataaatcgcaagcaatcaaatttcaataccaaaggaaaaacaaaagctagcatccacaatattatttttctttctctgtatgtcctagaagaaacccacatgtcatctgcacttgctgtgtggttcacctgctgcagtttgcctcttccaccaatgcttctcaaataagaatctcctaccaaaggacgggtgagaaagagacatggtgcatcatcctggagtgcactgaaactgttttctttatcttgaaggggaaacagatggagaaaggttgaaggtgtggtggggagatgaagtcctaaggaatttggctagcctttatttaacattattttcattttaaaaaatgcatgaaaacagtagaatgacattgtgcatggcttttcaattctgtttgcagagggtcactttggagccatgcttctccaacctgtggaggtaaatgctcattcccctcagccaagggcactctggtaataagaagaagcccagagaaaccatttcagtaaaatcctaaaccttaagtcaaagtcccctgcattacaaggatacagatgtacaagatactaaggatttaaccatgtttaacaatgaaaagtggtctttcaaacgatgagatacggctctactggaggactctagagcctccctgtccaatacagtagccactagccacatggatcacctgaggccaggagtttgagaccagcctgaccaatatggtaaaatctcatctctactaagaatacaaaaattagccaggcatggtggcaggtgcctgtagtcccagctacttgggaggctgaggcaggagaattgcttgaacccatgaggcggaggttgcagtgaaccaagatagtgccactgcactccagcctgagcaacagagcgagactgtgtctcaaaaaaagaaaagaaaagaaaagaaaaaagtaacaaaggattgttaagtcacggttgttggctttggaagaatttgcttttcttgttcattttatatgtccttgtccctcttccactcaaaaatatgtacaaaaatgcacataaaaaacatggagttagagtttttacactctcattaggaaactaaggcatagccacattaagggataactatggatatccagccacagtcaaatgataacacaaggcagggctattatatgagtccaaaggaaagaatgagcacttccagcaggagttgccaggagaaattggtgggtctaaacaggtcctgagagaatgggccagatggggagaagagctaagggcagtccctgaaaagagaactgaataaactaagaggcagaagtgaaactatgcaaagagagataaaggggcagtgttagcccgacagagcacttccacagagtaaccacaaaatatgaagaagagctacactgagagccagggagaggactgtgagtgttagaccagcctgggccacactttacagactataaagaactcattcaggtctctaggaaggctaatgacaagatagaaacagggtttaatatagtggggtaatttaaataaaatttagaataaagaatctgtttatctgtgatttcaaatcctgtgatatttgaagaacatccaaatgagtggcactccaatgccagaacatgtttacgttttgaaattaagcctcttgtgtcgatgtattttaattggagtgtgggagggtgaggaaatatcaaattctataaactttctaaaacatacatgtataactccaaactattctatttctctagtaaaaggggatggcatacaacatggcagaaagcttgaaacagtatctctgaattaactatattgtcttattctctgtattcttgatgtgctgacatctggggcctcaatgacataggaaggatgcccctccaagggttagcaaattcccaaagatagtggctcagagcatgtttctgatatgcaaaccaaccaatcccaaatccgtaaccccaaccacatccttttatggactctatccccctcccctcaatcatccaggggccaggtgctggacaaccaggagctacccctacagccctgtcagctgaaattattcaaactatccagtcctaagcctatgtagtttacttacctggccttgcccattccttcctgcaaaaaaacacaataaaagctcctgccctcagttctgtctctgtcgctccctttcctctttgcgtactgattttgccttggtgcttccctgtttggctctgtgtgacatgtctgtttctagaggcctgtgagcataattaaaacttcttccttcataacaatcattttcatgtttctgtgccttaccacacctgattaaaacgaatctcaggtaccattaaaataacctgtcaagcttgaatccagaaggttctcaatgtgaattatttgatcttgagacccattcaccaagtaccttgtgtttctacaccaactctcctttcccttatgcaggtaactaattcaagaaccatcaccaaaatatcacttctgaaaagaaccattcaggattttctgtgattcagaaggtcattactggagctctgacatgaattcattcttaccagtagactcttccgctcaccacgaaatggtaatttatactccatgaggacgggaggctctggctaccttgctcattgttgtatctccagcacctacgtgtgtctgacacagtgcatacctaataaatgtgtctgatgaataaatgaattgtaaagaatagtatatgttgatatagacagcctatggaatacagcttagaaagaataccaacactcctaagtggtaggcagcatgccagtaagttagaataataggttctagagttagactaaaggttaaatccctactctcccatttactaagtgtgcacccttgggcaagtcacctaaccctacaaagcctccaacatttcattcataaaaactgggaagaccaaacctacttcagaaggaaaggattaaacagactagcccatgtaaaacatgtagattccggttaagatggtaaatgtaaattcatgttgtggagtcccacatcatcatccccacatctccatttgaaagacaaagcaatgatggatgaaatatggtttttaaagtacagtaagagtcataaccatagtaaaaaaaaaaaaaaaagtatgataggccaggcatagtggctcatgcctgtaatcccagcactttgtgaggccgaggcacatggatcacctgaggtcaggagttcaagaccagcctggccaacatggtgaaaccctgtctctactaaaaaatataacaattagccgggcacggtggcaggcacctgtagtcccaactactcaggaggctgaggcaggaagaattgcttgaacccagaaggtagaggttgcagtaagccaagatcaagccactgcactccagcctgggcgacagagcaagactccgtctcaaaaaaaaaaaaaaaaaaaaatatgataaacaactccatgaaccaacagaaactctaagtggtgtacatatctgaagctacaggcaaaggcagctggagtcaacttccaaaaggtacaagtgctcccactagagaggaaggcaggcaaaaaggtctgctcactgcctgagaccatgacctggactggctggtggccttcactgcacatcacttactttatcagaatactgtaatgtctccaatactctacatctaaaaactactgtttccttttccaaggttccctttcagtgcatccctgacttacaaggcagacagcagctctctttacatactcctctttcatgccttcttatctcttacctctatgctttcttccaagccatttcttatttatagaatatctctacatggtatcgcttttgtgatttaacacatcttattaattccacctcttctcaagggagcctttcctaattatttacaaagtggtaagtattcacttccaaacccttataaactatctctttacaagctttacagggcactatcctacaaagcagcaacgaagttacttagtacccagaatgaaacatacaaattacaacctaccttctaaagccagagacagagggaacataagcataaacaaaagtaatgcaagtttattattcactcatatttaccatgcaaaatgaaagttttatgaagccttgaacaatatatatttgttctattatacaggcaactaatcctctgtaaatggtaatgtatcagtattaacaccctccctagtctagaatttaagaacatgaagagaaagtatcaaaacttctgtgagagggataggtctagagtctctgaagggctttcctgctgcaggccaatggatccatgacaacaaatgtaattcttaaaacattgctgggctttgaagaacacagagaaactaacaagggactaaaaaatggtgggggaagaaggaggagcaaagagggaagaagaaaggaggcagaagacaagtaagccaaaacctgatctgtaagcaacatgcaaaagaaaaaactgcagaatgccaaggagctgatgccaacaccagcgctaggatttacaggtgactatcccctccagcccccagttcccagctatggtaagtttagggaactgaacctgaatttccattcataaaccagaaccctcaaatggagctaaagtgctctcaatcaagagcattcccagactcccggcaaaagcaaagacaaatcctctgggagaaaccaggattaacaaatgtgaaatctgtggtcattcagtaccactctcaaaatcaaatatcacaaaatatgcaaaaaaagaagccactgtgaatgagaggcagctgaaataaccagcataattagacaaacacttaagctactaggattatcatctacaaaatatgaaatattacacagtaaatgtttaataaaataaaagatgtctaaaaatgaacgaggatcaagagacaatcgaaagcaaccagccacataagaatgccaaaccaaaaaagctgttaaaaacatgaaaaaaatcattgaaatgtacagctcaatagattggtaaagtagcagatttgttccaaacgaagggagttagtgaactggaagaaacaactgaagagacttcccagaatgcaacacaaacagattgcgggaggagaaaataaaagcaagcttaagaaacagagaggatagatcaacaagtttaagtaagaatcctagaaagtatggccagaatgaacagaaacttatcaatatttgagaagacaatagctaagaatgttagagaactataaaacatatgaatccagagacttgagaaacatacatataccaagcaagataagaaatcttcaactagatattttgtaattaaactgtagaacaacagacacaaaagatcttaaaagaagcagctgggtgcagtagctcacgccttgtaatcccaatactttgggaggctgaggtgggcggatcacaaggtcaagagatcaagaccatcctggctaacacggtgaaaacccgtctctactaaaaatacaaaaaaattagctgggtgtggtggcgggcacctgtagtcccagttacctgggaggctgaggcaggagaatggcatgaacccgggaggcggagcttgcagtgagctgagatcgcaccactgaactccagcctgggcgacagagaaagactccatctttaaaaaaataaaaaataaaaataaaaataaaaataaaatttaaaaaaatgaaaaaaaagaagccagaaagaaaagacatttaaaggaacaacaattacaccaaaaacagagtttaaagctgctacaatggcaactagaagatagtaaaaatgtggcacaaacactactactactactattaccaacaccaccaccactactactagggtgtgtaatataaaaactgcttgaagacaataaagaccaagctaatggagataaaactgaagggattatgactctccaaagagatgcttctttgccaatacattttaaaactttggtgataagaacaaatcctcagaattcttcaaattcttagaaaaatatataacttaccaaacttgaatcaagaaaaaaaaaccagaaaatatgaataatactaaaacaagtctaaaactatcaaagaaattgaatgagtggttaaaatcttcacataagtaaaaaaagcaccccagttgcaggtggttttataggaaaggtaaaaaaaacatttcaatgacagctcattccaatcttatagaactatgttatataacagagaaagaagaaatgcttgacaacaggttttataaccattaccacaggaccagtcaaaaacaacatgagtatgagaaagaaaaactgaggccaacctcagctgtgaacagagatccaaaaatgcaaacaaaatattagtccaggctgggtgcagtgcctcatgcctataatcccacaacttcaggaggccaaggcaggaagatcacttgagccctggagtttgagaccagcctagacaacatagggagaccctatgtctacaacaaattaaaaagaaaaaaaattagctgggcatcgtgatgcacacgtgtagtcccacctactcaggaggctgaggcaggaggatcacttgagcccaggaggtcaaggctacagtgagctatgttcacaccactgtactccagcctgggcaataccctgactcaaataataataataataataataataatagtaatagtaattagtccatccaaaaatctagaactgtaattcaccatattaatactcaagaagaatcattatcatctcaatcaagttttttcaagaaaaaatttaaaaacttcaaaacccatctatgattttttaaataaatctcaaactaggaatagaaacaaagttatttaatttgatagagaatctaccaaaaagttacagagaatattactcttaatatttcacattaacaaaactctctttagatcaaaaacaagatgaccctttatcacttccatttaccaatgtactggaaggctgactcagggcggaaagcagaccaactggcaagtatgtccactccttactcatagacaatctgtctaccaagaaaacaaaaaacctgtagacaaaatgtaggaattaaacaagtcacatatatttacttaatccagcagtgggactgaataaacatgaactaaatttaaaaacatggataaatcttagaattaatgttgagggtaaaaagcatgtcgaaggtgattatgtaccataggagatcatttctattacactcaaaacaaaacaaaaccacacaagaaattatttaagggtacaaatatgtgtggcaaagccattttttaaaagaaagagaatgataaaatgcaggggagttactgtcacagaggtgaaaaaggatggtggaagagcacctaagtagcttttagttcctaaaatggtgaagggggagggtgtcaagagtatgtgctttattaccatgcttcctaacttacatatgttatagattctttaaccattacataaataatataattaagttgataaaatagtacaaacaaatgatggtcagtagatacatatttaagtaacacacttaattaaagctcctgttaaaaacaactcatttcacaggtttcattcaaaggacggtaaacacaggaaacataataaccactacagaatatgtgtatcaacatatgtgtatcaatagcgaatcaacatctgtactctgggaaaggagtatagctctcaaaggagagaaaggggaaccagggctattgagcactagccatgaagccaagtcctgggcaggaagtttcccatatcttgttttttttccataaactcagaaagcccctcaccataaggccctggagaactctcctactgtaggagatctttcctacagtgctttgccctccagccagctctgcacctgctcacattaggcctttcctttacagctataaaagtttatcttctcacactaacctaagcctacacctctcaaaccacaaataatttctaaaaaaccaacaattaactttcggaacctataattcagttctgagtgtgttctccaggtacccgtaatctggccacttatctaatacatttggacaagaaagactttaagcttaataagtcaaaaaccacacccaaacattgtttcaactttgaagatatgatcaatgcacacagatatacagatgcataaagatcataacctcactagtagaaaaatatatatcaaaaaaagtttttgcatgtcagatttatatatatatgtatttatatatatgagacgaatcatctctaatgttagagtataggaaatttacataagacttacatatcagtttatataacatttttgggtttttaaatttttttattttttacagggcagtttctcagtgtgaatatatgaccttttggagagcaattcagcaatatctgctactatttaagatgtgtgtactcctccatctaataatttcacatctaggtacccatacaggaaaaactatcacacatgcttgcaaaaaaagaaaatcacgagaaaattatttgtagcacagtttgtaaaagtgggagggtgggaggaaggaaggaaagaaaaaaatatatgtccaccaacagccatttttatttgtcttcaaataaaattaaagatcaaaaatactttatttccaacaagaattataaaagctaaataaactcatcaaaacttacttcaaaaaggaagaggatggagtccagctcctccctttgtgacttattattccctggaatattaaaaaataattagttatcatgacatcatttaaacttcaggacactacaaattatgctaaaaggcagcttaaaactagtaagcctcaacatacattcatttattcaaaaaatagcaagaggcagtatggagaacacattaggattgcaaacagacaaccgagcccgactgctcagatccacatccagcagagctgccccttgctagctgtttgaacacagcttccatgttttccaacttgttaccaaactatgatgggtaatttattcatttctcaactagttacttattggctcaaattgtggcagaatgcacagcacaaacgaaaaatttctaagttggtaatataaaaagtcatagagcagataactataaaagtagtatatcttttggggcaactgcacactgtcctattgataataacaacagtaataaaacctacaacacctgcagctgaggttaccattttcggtcctctctgtgtaccaagcatcgtgctaagtgcttggcgcatatcatttaatataggaatcaacaaacctcttctgtaaagggtcagacaataaatattttaggctttgcaggcctctcttacaaacactcaaatctgctgttacagtacaaaatcagccacagacaatacataaataatggatatggcttgtccaataaaacgttatttataaaacaggcagctataagctgtggacccctgatctaactgaatccccacagctcaatgaagtagatatcattcattcattcattcattgaataaatactacagaatgtctatatgccagggattattctaggccctgaggatacaggagtgagcaaaacagacaacaatccctgcccccaacaatttaatattctggcaggagggggcattctataaatgagtgagaaaaacaagaaggaatgcagacacagaagccaaaaaagatggtatgcaattttgactggggaagtcagagaacatctctctggtaaggtaacatctgagaaaagatcctttgaggttaggaagcaagccatatggaaatgtgggggtttggaagcaagccatacggaaatttaggggaggtgtattccaggcagaggaactgaacaatgcaaagtccgtgtagctcaacatgtctggcttagtcagaaaacagtcagaggcccttaaggctggagcacacaagcgggacagttggagaagctgaggttggagagtaggtgaggcaaaagaaggcagattaggtggagcctgagaccactgtaataacagggaatgagaacccgtttgaaactttacagcagccaagaatcatgatttgacccattttttttttttttttttttttttttttttttgagatggagtctcactctgtcacccaggctggagtgcagtggcgcgatctcggctcactgcaagctccgcctcctgggttcactccattctcctgcctcagcctcccaagtagctgggactacaggcgcctgccaccacacccggctaatttttttttgtatttttagtagagacagggtgtcaccatgttaaccaggatggtcttgatctcctgacctcgtgatctgccctcctcggcctcccaaagtgctgggattacaggtgtgagccaccgcgcctgactcatatttttaaaggaggactccagctgctcttttgacaagaaactatgggatgggagagggcacaagtgtggaggtgggagaccatttctgcagctaatgctataatccaggtgaggatatcaggagtttcagtgttaccagtgtaggcaatgagaacaggccggtgattctggatgtattttgaagatagagccaataactccggagttttggcctgaataactgcaaaggctcaagttatcacaagattatttatttcattattccttgtaggcattttcttttattcttttttaaggtacagtgtcttccctgcactccaatcgaacacagattatactaaaagcaaaagacttcaaaaatctcactatttttattggttcttcactatgattctttgcagtagattgcaagaatggccacaatcaaagaccaccacagtgcctcaccctgaattccttccactccatgcttgacaactgcctgttctacaggagcaatcagggcatctgacaaggggtcccttgatttttcctctccacctcaaaatgtctccatatctacactatccccttatctgctcctccttacatagaaaggtcacctgtacgctcctctccatgtctcttctttttccttgacctgtctcaactcacttcccccaacacctgcaccattagttatctccccctccagctgacccactcctcaatctgcaaacaggccaatgcattcctcaataaccttcccgtgaccagggtgagatacaatctgtgtcttcacatcaaactttctgaaaggatattctcatgggtcaccttcaacagctcaccgccctgtgactccatgtccatctgtttggcttccgacctgctcctcacctagaacctttctctccgcactcactaacaaccacactgatgagctcttactccccagcccagctgcacctcatgcaccaataggctgactctacatgccttcaattctctctcccctggtcctctgtgacaaaaccctttcctggtacccctcctactactccatcgctttcctttgcatatacccaataaaataaggaattatctaaaagttctgaccatcactctctttctctgtatatactttttcccttggcaataacacgatttcacctcttttctcccaagctccagtcacctatattgtactgtccagccaacacctacaccaaggtatcccccatgcacctcaaacacagactgcccaaagccactctcaccctcctgccttccaaatctggctcccctccagggttcctgcgctaatggcacctcacaaagcagactcagtgtcctgaaagcatctttgacttctccctttcccttataaccaagtctcatagatggtagacccactgagacacaacacttttcttttcccttaactactgcctccctggatcaggcatcaccatccctcagatgaatgacagcatcagccttccaattggtgttcttgcctctggttcaatcgctactttacaagatacttgtgatagtaacaaacactttcaagagctctaaccacctccagaacaaagtccaaactccttagcctagaattcaaggctccttgcaagcattatctaatttcctgcaaatctctttcacacacctttgctgcaagaaaaaaaaaatgcatttcccatacatgtcgtaagaacagccctacctttactcatgttctcccctccagcagcagtgccgctctcttccacctgaaatcctgctgtccttcaaggtccattcccaaggccacctcttccccaaagcctcatctatatactcagcaggaagtcatctctcccacttcccaagaaccacagaattctgtctaaatctctcttacagaacaactgactttttaacttttttcacagttatttatgcatatggcttattttttaaataaatgaatgacatctacttcatagagctgtggggattcagattcagcccacagactacatgaaaatgaaagaagatggtgacagcagctactacttactgaccatggactatgtgtcaaactctgtcctaaaatgctaggatacctgtgaacctgtttaacgctgacaggaggaagccagctcagagacagattaatttgcccaaggagaaacagctagaagggtggggccaggttcccaacccagtctggctccccaggctacactatcctaccacttaggtgacaggatgtataatgtatacagaacagaatgtataatgtgaccttgttggtttgattttcaaagaatatagtcacaaacatatataaacataatacattaataatatatctggaaggagatgcaggaaatctttaatagtggttgcctctgcaagcagggcaaaacagacacttgagtgttcatttcagacccttttatggaatctaaatttttttaatagtatgcatgtattacttttctttctttttcagtaacttactcctttgaaaatcatgctttctaagggttccttctgctatttttgctagccatgtgttgttcaattaacatccatataagtgaaagctcaagagaaacaaagatgccaccctgtccaccatgctctcacagctttgctaaaggcttggcaagaaagaaagcttaaaaatgtataatttgtggctcatgatatatacaacttataaaaatgcccgaatgttttttaaaaaaaaactactgaaatgcttaccttttaatttcaaactattttccagtgctataaaattttcatagaagatgaaatatatctgagaatagttggtctcaaaaaactgcttaagatcatttgcatccacattatctgaaaagaaaaagtttccatttatgacaattcactttataaaatcacaagaatttagaaacaaacttctcagaaaagaaggcaagtacaactagtttcattcccttataagacaatacaaaacaaaacagtattcctgtttgtttattctccacctaagagagttcttacttgaaccttgagtaccacccaccactcagccctgctcaggagaccgtggagccaattcagggaggtcggagctgacaggagccagcaacaacggaccagctagaaggctggaggtaagcaggggcaggtctggggagggacatgacttcctgttacgggatgaggaagtagaggttcatggaggaggcagtttttgacacaggccgtgaagagggatgggtttgtacctctgaaaaacaactttgctggtggagctcctaaatggaccaatctctgctccctccccaccaacataactctctgggcatgaaaagagaaaccagctcaagtgaactagcacatgctccccaaccacaagcttctagatgacctgcccccactcatgtatggacactgtaggatctaccatgtgttcctagagttgcccctcttgtactagacagttttgctaaaccacagactgcggatagataggcgggggtgtggggaacttagcacagtgacaactcccactggggctgattagcaatacagccagttcttccaagggccccgatcagccagggtaaaacctcacaatgctgggggctcaaagtagttatccactgtcaacacacctttgtacattttcctcagtaaacaaggttgtttgtgccatttacagagtactgaccaaggagttggcactttgggagaatacactagcatctgaggaaaagtaaaaacagctttctggagccaggcattgtagctcacacctataatcccagctacttgggaagctgaggcagggtaatcgcccgaactcaggagtttcctgaggctacagtgagctatggttgagccactgcacttcagcctgggcaagagtgaaacccctgtctcttaaaaacaaaacaaaacaaagcaaaaaacaaacaaacaaacaataaaaagcttccttaaaattctgcaaggattactcaagaaaaaaatgtgttgctcttcagtctgtaacagtgtggtaccaattgcttttgcagtcctaacactgtgaatctatgtgaacatacatattatgattttcaaattatataacgttagcaataatgcagatgattctgaagagttgtttttctctgataattgtataagagcttttcatgcaaaaatgtgccctggctctttgaaataatgcatgtaaggtgcttataaagtcttatgagctgccaatttcacactatatttactgcaccaaaataaaactgggcacacagctgtgaaaattcctagcaaggaacaaatttactgtgtgaaagcaggtagcaatgaaactagtatcaccaacccacatgaatattaaccttcctatgatctatacaatcttgacaaggaatccttgagtgccttgtggagaatttgccagttccaaggaagagttcagtacacttcaactctaatgcaaactgctagcccatctaccactaactgagccctctttctgaagccagcttcactcagctggctcctactcaccctcactagtcagctaaaacatccccatcttacccccaagactaggtctgcacctctgctgtgtggcccccactctatgcttccctgtcacagaacacatcacactttacttaattctggtggaattctgattgaattcctgacttaattctgatggaataatctgtctcgtctatgagacatattccctgccctcacagaacccacagtctatctcgtgaatcattatgtcccatgcatctagcacaatatttagttcaatattttcttgaattgagaatccatgaattagcctacacatacaatgataaaataatgactacaacttataaacctacagggaagaaatagcctaaccctcaatccttggggcaatcaaaagacaaatctcatctcatctctgctgaggacttctgatttccatctgcagccctgacatctcccactgtgggctctagtctcacagactgctgccagctgatttctccacgtgagggtcttaaaggcctctcaaattaaacacgtccacagggaagtcctccatcagatcctgttcttccctctggcttttccgtcccagtaagttggaacctccatccaccccgctgctctggccaaagcctgggcatcattcctcactacccatccccagtatgccattctgttagcctgcctttaacacgtacgtgttccagccctggactgcttctgctctccacggccctgcctggtctgtgtggccatgaaccctcacacaggctgtgacctctgcccattgcctgggttccctgcttccactcttcttccattccccatagcggccaactcgaatatttaatagagtcagtcaaatcagaccactcctccactcaaaaccttccatctgcctccagtagtacttaaaatccgaactctttaccatggccgggcaaggccctgcctgatttcccccactcaacacgaacttcactgcacaccactctccccttcactccctatcctctaaccactgtggattctttccattccccaaacttcccgaacatattcttcacttggggcccctgcaggatgctacccccactcccagatcttcatgcagctggttcagtgtatgagacaaagtagcaaatgtagacactatgtctgttcatcctgcttacataacagcagaattgcacaaaaccccttgccagcagaattttacaaagcccctgactcaaagactcggcgcagcccttgagaagaatgccctgaagatgataagcaggatacagcaccggttcccacatctcctgcctgaatcaccacattttcaaaaaagatacactcgtcttagcccttgcctcttcctgtatataagataatatctgacaggattaatgactacgcctctataatctataaccagatggaccctcacacccaaaccttggtaagattttgctctaatgtaacttctgagcacacttaatgtaacttctgagcacatgcagagtgcgccacctgtatataaactgtgggctaaagcactactttggaacagtctaacagacactctctgactctccctggttgcgaacctcagcaagacttctgaataaaactaactttaatttttttaatcaacaggtctcctctttcagaacctgggtcacacatgacttcctcaaagaaacctgcaagtgcccccatgtgtcactccacatttcctcctccccccggccctctctcttggtaggctctgcagtgaacgtgcctcagaatgccataagctggcaaacaatttctctagcatggaggaggtgggtgtgctgatgcagcaagctggcacagaaagctactgggagatcaacaagtccccatctttccctcccttattccctcattccctcagacactcaagtatcagcaaaccaaacaaagagggtcctcagcatgtttaaggatccctcttacacactgagatgtcctcatgaggccaaaagtccaggtaacaaccacctttatcctcagccatccaatatctttcttgtggataaggcattggtggtgttgagcttaagtactcactaacaagacaactagatacattccagggaacccaaaacacagtgaacccagaagcatagcatctacagcacactcagtttatgtacatgtgttgagaactcctcagtggtctgggcacgctcttcacacaattccccctgacagcacttcagaagagttgaaatcatccctttattaatttgctgcctcgttgtctggctgctagaatgtaagcggcatgaaggcagaaatctcatctgctttgttcactgttgcatccccagcctgaagaacggagcttggtacaagaaaggtacttaacacatttgttaaatgaataaccaaataacaaatatcagatattttatctttaattcaaaatctagaatcatttcttgatttgtctttttttaaaagactcatcagaagaatatttataaagcaagcataggtctcagggaagacaatcacaggcaatggaatttagcaacctgcgaaaagaaacacaagaaaggatcaaaagcctaatttttaacaaggctaatttcaagaaaaacagagatataacaggaaggctttgctcaattaaaaaaaaaaaaagacaactatgaccacaaacttccttcagacaggcaatcttgacccactcattcaaacatttactagcccctatccatgtcaacaagtgcggtgctaagctttaaaaaattcaaagagaataagacccgaggccctcaggggtgcacaggtaaacaaacaagtaacagaacaggcaccatggctgaagcccatgctggacaccaaaacagggagtggacaaggccacatggggaagctaggaatgctaatgtcatacatttatgtcatgtgttatgctttaaaggaaatgttcatgagtttattttatttgaccctcaccatagcccaatgaaatagatgggcaggtgtgattaagagaaagaaacctcagggtcaggatctccagtgacctgcccaaggtaacacagcctgttggggacgtcaacagaacccctgctctggtcctgcgactccataactgagtggtacaaagggacaaatgggaataaatcagtcaggaatataaaagaaataaatcatcaccttgaggatgagcaggagagccagaggagaaagagcaggaggaaaagcccaaggtaagaaacaggactgagtgacactgaagaagcagctcctggaacttgccccacagcctctcagggctgtagggaaaagggagggagggcaaggccacgctccagagtccagatgggaacccgcctttgaagggatggcttccagggtttggcatggaatggatgctagcacactggcttactactattacagaactcagggaagcatgtccaaattaaccacagagaagcaaacggcagacagcctggcagagctagaggtcatttctgaatttttaaagaaatctcctttaacttctcattttcctgcaccaccaaccaaagataatcttctacataccacccaaaatcaccctcttccactcctttgtccagctaaacctcttgttgattaagtatttctccacatctagctggaaggcaacagcaaaggttgagggcaaaacctctggggcagactgcctggattcaaatgcagaagccacaggaccttggacaagttatttaaacactccaatcctcaatttcatcttaaaaatagggctaacaggccaggcatggtggctcacacctgtaatcccagcactttgggaggccaaggctggtggatcacttgaggtcaggagttcaagaccagcctggccaacatggtgaaatcccaactctactaaaaatacaaaaattagctgggtatggtggcacatgtctgtaatcccagctactcgggaggctgaggcaggagaattgactcaacctgggaggagccgagatcgcaccactgcactccagcctggacgacagagtgagactacacctcagaaaaaaaaaaaaaaaatagggctaacaatggttcttacatcacacggctgctgtgatgataaaatgagcatatgtagaatgcttataagagcttcagtcagcattatagaaatgtcagtagttttagaattactttgctcctggcaaaggtcactaatcctaatacagcagtaagtactaccagtatacacacccacaaaaccagtgggattatccatctatttccttccacatataatcctcttcaatagcaattctattgctttttatttggaagggtcataacacagtctcacaaaaacctgcttcagcagacccctagaaagcaccaaaggaagggaaaaagtcctcatctcactcaggagccccagtgggatgctatcaagggaggaaggagctcgtgttcagttctcctctaatagggaatgacccccctgcaccttctatactgcctacacccctccattcccaagccagaactaagagccatccaagccctgcctatagtcctgtgtgtagatgaagataggtgtcctttactattttagtgaaattccctggataatggcactgaaggcctgatgatcaagataacaggctggtgataggaaaaagggtaagtgaagaatgtaaggcaaacttgacaacttaataaaacagtcattcagaagcactcagtgagaacaaggaaaataatgaagtgcaaaagaactagtcagacacaagacagaaaatgcagacaaggatggatatcattagtaatgcaccattacttacttataggctaatatgattctggcgatttcacatttaaacagctgcctaggtccctgggtagtttgcagaaatgccacaaatcattccttccttccatccacacatttggatggtgcccaaccacagtgatccaggactgatctcctgacttgctttggccaaaaaggccttaaaaatgtggcagtggttgctgggagagccgcaagtagttgctgatccaagcaaaatgagaaaattcatgaaaagctgaacccaacccaccagtctggagccaaccccaggcaaccgtcagtgagaagaagaaccaccccagcgaatacagacccaacacagtgagggagaaaaatggatgcctgttgctgtaaagctcacggaagctgctaggtttgggaaggtttgttatgcaacactattatagaaatggtggtgcagaagaagaaactcagtacagaacagcctcactggtcataagagccagcaaacctatgaagagatacccccaagtataacacatcatcccctccattaaagaaggaaaagcaggaaaaatgaatccaagttacagaggcttgcccactgacacaaactttctgtcaacagtgatccatgctagccagagtgaaggcaggaattccttttcctgacaccagccagtatgtttcggtacctcctatgcgtgcagtaatgtgctaactgcaggttagaagcttatctacatcaggaggcaaaaacctacaaaataagactttccagattcagcaggcaatcagatcattaaacaggaggtataccagggatgactggctttaatggccaatcaacactcttatcatcatcatcattattaaagagaaattcacatctgaaaaatgcctataaatacagactttaaaatgtctcctggagaatcacttgaacccaggaggcagaggttgcggtgagccaacactgcgccactgcactccagcctgggcaacaagagcaaaactccatctcaaaaaaagaaaaaaaaaaagtatcctggactgattatttgcaaatacaaagtattcatgtggatgaaaatactaatttacaaagcagaaaacttaatgcatcagacaaaagactccagccccagtgctatcatggcgtgaaactcgagatctggtcaaagatgcggtgtgacaagcccaggtggggaaggatggaataggaagtgggctgtgaaggaagcacagagtccccttagtccccttagctaagccctagtcatccccacaagtcagttcacaggtaaggacaccttgcccagctcctcacatactgctcttagatcccctcctacttctatacctcagtctccccgaccagactgttagcagagagtgtcaggtctccattcagccaaagcacaggtattgaatacatgtgtactaaataaacacatcaaacagcagaatttagatatacagagaggcttcataattaatcctttcaagcattcctgaaggtcacagcaaataacaaaaatgattttttaaaaatcgaggtaaaacctcttacaataatggaccaaaaaagattcctccaaatcaggagtcaggactactaccctagatacagatgataaattactaaaagtaacaagcaatgaaggtccaccctgcagctagtattaatttctagtaaatagtaacattttcaaaagaatgatggagcaaatgtatgttcatcccttaagttaccaatagcattcatattgttaaattaccttttatataccatctattatataaaagtctctatgttatgtaagaaaaatctgaaatcagaaacatcctcctcagcactaaaatttttaaacttgttgatatattttaagtgaatttatgttaatttaattatattcttttaccttttaacaacttattttttacaaaacagcaaggaattatcaccatcatatttgttttacacacacatatatattatgcctgctacaaatgtaaaacttaaggcataactatgagtaaatattaccaaaatcacactttctaaaaaataaaataagacaggaacagtggctcacgcctgtaatcccagcactttgggaggccaaggcgggcagatcacgaggtcaaaaggtcaagatcatcctggccaacatggtgaaaccccgtctctactaaaaatacaaaaatcagctgggcatggtggtgcacgcctgtaatcccatctccttgggaggctgaggcaggagaatcacttgaacccgggaggcggaggttgcagtgagccgagatcgcgccactgcacaccagcctggtgacagggcgagactccgtctcaaaaagataaaaataaaaaaatacaatatgtcctcaggcccgcaatttcctcctctcaattaaagtgaggaaaattggtagagatcacaaaaaaagactcttaatacaattgttacaaggagtttcaaaaattaaagaaaattaacataaacactctcagttagggagctcactcctcctgcagattcagccagcagctcagggcagaggttccctcagttcctggcctgtcatctgagttccatcccacaaaccgaaataccagcagcaaatcccttcctggattttctgcttcaagaaaatccacccctaacctcactcacccttccccaaaccttccctgtccactacccccctcatctctgtcatatctttttcagtctaaggttatttatagaatttctgcaaagctttatgaaccaaaagacataagtgtattctacaagtacacttgtctaatatcatcaagatttcgtatttcagaaaaattctctgaagtattatactttcaatctgcacccactttagcataaacatcactggaaacatgtgatatggaattactcctgaagtcatccagaacttaagtaataacatactcaagataaccctggcccctcctttaatacacagcaccccaccagagtgatgggagatcctccccttgctccttgcaagaccccccattccctcctccttacctagctaccatgagctgcctaagaaaccaaactcagtaaggagactataattagaagtaatcattgaccaccccctaggtacacatcaggagatatcccatcaggccttgcactcaggtttccatccatctcctgggaaatccaattcccacatgatcttcatctctgactgtcacccccacacagctctgggcatcactaatctcaccctagcttcctcaccctaccctcccacccactatatccaataaagctcaccaaattccgtcttctatgccacctgtaaaggctgtttcctttcagctgtacctgaaacctggaagtcccctcagcacactgcttccttgcagtctgcctggtaaggcttttgtcttcctcctacactcacataccaccaggcctaagatgagataggtggcccccttgctccccactgcaatctccagaccattctggtccttccctcacacacagagtgctcctctgctgctcacaccatctacctccaactacatctgtgccaactttcactgactggagttgcacaatatttcccacatcccaagacactctcccgaagattccagggcccgactgtctttcagtatattactagcactgtcttcactcctggtggtttcaacatttatatatatgatgcctgactcccccatttctaatgaggttgtcctctaccctacctctgccgcccacacccacagccagatcctagacctgatggttacttacaatcttcccacctgcaagcctcagtttcaagaaatccactctctcgtcacccgctatttcttatccttcccgcccactccttctggaaccctaagtccaacaactcttcaaccttactgggtccttgaatccaataaccccaccaccttgtcactatctctgatgcccctcaagtcctcacttcccttctttctcaatttaacttccacagttcctctttttagtcagtcatttcactgtccttcaacccctctgcctctttctccctctaacgtattcacacaataaaaccccagtctcagtttcaacctgattcaattgaaagtatttatcagagcacaggccatgtacgggatacaaaggattttttacaattttgtattaaatatttaatccatgtgaaaaaaaccagttttgtatatacataatttatgatgtataataaaacaaacaccttaaatcacccacccaacaaaagcatccagtccaatcaggctttgacaccactccccgacacagtgctaaggagttccacaccgctaatccaatggccaattttcacttctctccagggccaatagcagatacccatgtaatctgtgtccaagcaccactagcctggtccatcagaaggaaggggagcctagaatcctgacataaaacttctggatgtatggtggggcctaaagtgtatattcctattccaagtgatatagtttggatatttgtcccctccaaatctcttgttgaaatctgatccccagtattggaggtggggcctggtggaagacatatggatcatgggggtggattcctcatgaacatcctggtgctgtccttacagtaatgactgagttctctattagttcccatgaaaactgattgttacaaagaggctggcaccacctcctctctcttatcatgtgacgcccactcccctttgccttctaccatgaatggaagcttcctaaggccctcaaaagaggaagatgctggtgccatgcttcttgtatagcctgcaaaaccatgagccaaataaacttcttttctttataaattacccattattcctttataggaacacaaagggactacgaccataggaaatgaaacaaagtcatcttttagctccactgacaggtttgtttcttacatacaattacagccatgttgtacatacctgtttaaattataaaaaaattttccataaatatatattcaaaaatttatcataactgaccatttatttccacaagcattcttcatagtattttaaactaaaaactgagagcagcctggagcagacactgttgctttctctccagctccttcacctcacccaccaaccacaaacagaccctccctcttcctaatagagcctccatttgctcagggatctcctcctccacaaagcagtgcccctctcggaacctggcctgttcgcagccccagagggaggacctgatactgctgagccaattatggtggcaacatgctccttgccagtgactcaagcctgtgacccaatgctgatcaatacaaaacaacagaaagtctgatgaagatagctgagaaaagctttactgattttaaggaagaagtgtgcctttttttcctgcctttggatatcattctatctgggtgcaatggctgtgggcattttgccaccctgaggacaaacctgccacactaaggatagcaaagccaagaggtggaaagcatctggactgtcaacatcaccgaactcatgaattagccaactctggggcctccctgccttgggacctctttttataggagaaagaaattcttattacttgcttatatttgagttttttgttacttacaaccaaaaatatccttgtaggcagacagctgaaataaaatttgccaattccaacaggaaacaaacactagtgtcaactgaaatgatcacagaaattataatattaatcctacttcatttctgaaagcatattgttttcatttctttattcctataaagtaaaccagatgtagaacatcaaattcttagaaatcagataaatagtaacactccattatccaggagtgatagtccttgtgtaaaagtaattctgtataaagatatagtccaaatacttagtgttaaagtttttaaaagtagagctatttttacttaacatttttgacacacgtttctcaaatacaggattctaaaactttgtttttaacagatatcaaataccaatataataaaacacactatagaaactgatatccaaatcaaatgtgagttatattacattttaatatatttatctatcaggaatcaagtttcattagacattttaaagtcaatgcacacttggacctccttttcttgatctgaattggagctagcctacattataatcaaaatcgctcctgaggggaaaagttggagacagaaataaaatgactacagcctaggagctgtagtcacctccacccctctaactaaggaggcaggaaagtgatgaggagagtgtttacagctgtcgaataatgtctcatgtcaaataattatgattaacagtaataacagctcacaaaacagctttgtatacattgactcaacctccaacaaccacaggatggtgggtaccattcttacccccactagaaagggtaggtcactgccaagactcgaacccagacagtcaggctcccatactgttcacccaattaagtgtaatactaatagaaagttggccgggcacggtggctcacacctgtaatcctagtactttgggaggctgaggcctgcagatcacttgagcccagagttcaagaccagcctaggtaacatggtgaaaccccatctctacaaaaaatacaaaggttagcgggacatggtggcgtgtgcctgtagtcccaactacttgggaggctgagatgagaggatggcttgagcctgggatgtggaggttgcagtgagccatgattgagccactgcactccagcctgggcaacagagctagacgttgtctcaaaaaaaatgaaaaaatttcaaaaaagataccgtaactttaaaaaaaaaaaagtgagggaggaggttaagggaagcatgcctggaaatctattttgttttattttgctgtaaaacaaaaagaacacaggagagatatggtacaagtcacagaacttaatagttattaaatacaaaagtacacccagaagttggtttgtttaaaaagtacaccagagccagtttgcaggtggaatgaccttcctcctagacagttcaaaatggtggcatttctgtgaaattaactcagtaaagactgaagtggctttccccaaggaaccctctttacctccaggaaatcatcatattatcccagcttgtgagcagcctccaatattgtcatctctgctgtgtccctaacacaagaaaacgaaggcccttctggtcactgggcagtcactcacaggcacacaatctgctaacagcatgtgaaggcctgaaactcatgacctgaaggatgggtgatagggaattttgttataggagtccagtggaacacactacagccattgaagtcttatgtaattcttcacttactgatgtggaaaaatatccaaggctttaagtcaaaaacacagtgttagaccatgcagatgactattcatgtaaaaccgtgtttgtgtgtgtaagcgaggcaggtgcagggaagagagagagaaaggaatgcacccaagcaagagccagcctggaaagcacgttcaccgggatttcagtaatgcttggcaggggactgcagaatttgagaaccccttgatacctaaattatttttcatatattcatattatccaaatgtttataatgagtatgtaaaattgtagaaccagaaaaagctataaagctgttttggggggtacttccagggcgttcgagaaagggatttttttcaaagcctgaatatttactgcaaaaaactcatcaatcatgacaccaggccatacttttttccaaacctgtcttacttttcaactttgaagaaatcttaagacccaaacaatatataaaagagtatctttaccaattctaaaatgttgtaaaaaacagcaaatgacttaaattttctctatccaacttttaaattactccttctgtaacagcacatacatggtacataatgccttagaatgacctagttatctggagaagctttgctgtttttgtgtttctctagacatcattcactgaaaaggataaaaaataatagaactgggcagaaagacatttctctgtccagccattcagcagctagcactgagtaggcatgagcaaatgtttgacacttttgaatgcaaagatgtgatgaaatttccagtcacaatgagacccattcccaagacctgggagccttagtccatatgagtcaacctttccttgttgtgcttaaacctgacgctgactgactgtcaactgacagaacagaagcttcttcatagcacactataaaagtgctaaagacctggtttatgctcagaaatgatgtctctggaagaatacaaatgattgtcctcctgtatgtagctaacctaatactgtcatattttgaaacaccacagccacctttctgagtaagacataaggttcagttagcaacactggttcatagaattacatctttgcaattaacactgagccaaagattaagattccctcaggtctttccattgagaaaagaccaacataaagcacaactggggtcctaatttgggtggatatctgatgtggagccaatctgcagtgtttgctgcctttgcaaccattcatattaaattgttgttgtactgacccatcaacatttttctggtctcattcttctccagccactgacagatctccattttttttttgtcagcatcaagggcactttttaatatgcctgctctctgcctgtcagtagatttggggataacagcaagcccgtctccatattgttacaagctcaggccgctgtgtgggcccattacatggcccaatgtactccagctttcctgtcccactggccacaaagtgtttccgtcctgtcttctcatcactactcgctgctgcagtaaggagggacacaggctgcctgtccccatcttccttaacacctttgcttgctacagattccacagccactcattcctcttctctggcacttctttctctctcttccctcttctcttgtctgcctccagtcactggtcggtttttgggccaaagatctgaccttttataaagtaagccaaagaaagctttgttacaaagcttgtggtcagaaaacctatctctggcaagctaaccaagcaagtgtagtctctatgagggaaccacattgattcctttacacctaaaggtcagttcagatcactcctctgctctttgcttcactggagtgccccatcttatcttacttagagtaacatcccaagtccttactgggatgccaaagttccacaccatcttatccctatttcccctctcccacccccgctcctttcccagttccttctatcctccacccctccacccctattgacttccatgagatttccagtctatttatgactcagatcctggtacttactgttccttctgcttagaacactattccccaaaaataatcacaaagctgctcccttgcttaacccaggtctcagtccaaacctcccttcagagaggccttccctcaccccaatatctaaataagcatacacatacccttatcaagcttaatttttctatcatcattacctgaaattgtatcatatatttattatttggtttttttgttcttgatttttagagatggggtctcactgtgttggccaggttggtcttgaactcctggcctcaagcaatccacctgcctgggcctcacaaagtactaggattacaggcatgagccactgcacccagcctgttatttattgtccatccaccctaatagaatgaaagtcccataagtgctagggcttcatctgcaaatagcagacactcagtcactatatgtggaatgactttaaaaacagtggaaacagtctaagctatgtagacttaaagagtggtcaatcccatttgttaaaagggcaacgctttacttccatcaaactagaaaaataatcctctcacttgagcctgggagagcaaggctgcagtgagctgtgatcacaccactgcactccagcctgggtgacagagtgagacctccatctcaaaaaaaattttttaattaaaaaaatagaaaaataatcctcaaatatgactcccataatcttaaatagaatttacagaatgtcatctaaggtttgctcaatgttttatgattattagcacaaaagtcaatgaatgtcatgtggtacaaatgggcgtgggcagagctataagcagttctgttgtgggaggtaatgtgccagaatgcctttcctctactttctcggaaagacaggagccagaatgaggttctatctctaggaacaggacaagtgatccaggctgaccaatcacagtaccccatctccctcacccagcgattggtacaggaatgggtacaggccctaggggagtggccacactcctctcaagggttactagctgccaggacatgtcaggctggcaatgctagagaccaccacacctgtacctggcagagttggcctgagaatgaagcagaagcacagaaaacaaaaaacacggaaccaaaggtagagacaattttccaccaagttgggaggtgggaaaagagagtggatatgagactgggtaagtaccctgaccacatacatccctgtggacagtcatctctaaagccaaacgctcccttagactgtttagttacgtatgtcattaaatcctctttggcatgggtttctgccacttgcaacctaaaagtcctaagaattacaaatacaaatgtactcaacatatactaccctcctggtggagcagaataattaagaaaagaaaaaaaaaagcctagtctggttaaacatatacatacaggtggctgtcaagagctggggagaggagggaataagcagtgaatgcttaatggttagttttccaggggtgatgaaaatgttttggaagaagatagaggtagcagttgcaaaatgctgttaatgtattaagcaccactgaattgtttacttttaaatgatttttttttttttttgagacagagtctcactctgtcgtccaggctggagtgcagtggctcaatctcggctcactgcatcctccacctcctgggttcaaggtttttggtttttggtttctttgttttgttttgtttgagatggagtctcgctctgtcaccagactggagtgtggtggcacgatcttggctcactgcaacctccatatcccgggttcaagtgattctcctgcctcagcctcccaagtagctgggattacaggcacccaccaccacgcctgacttatttttgtatttttagtagagtattttgtatttttagttttaccatgttggtcaggctggcctcaaactcctgacctcaggtgatctgcccacctcagcctcccaaagtgctgggattacaggcgtgagctaccgtgcctggtctaaaatgattaattttatgttatgtgaatttcacatcaataaaaaaaattaacattcaaacaatgctgcaaagcacttcttgatggtagaataggcttttgcgaaagaggaaactgggtcaaatgggatatacatttcaaagatcattgatctgtattaacaaatgacttttcagaaagattgttccaagttacagtcctatcaaaaatggagacagcttacacagtatactatcatcagagaaaaaagacaacagcaaatttgctaatataatggatgaatatattttaatctctaagtttatatatttagattactagtgaggaataaacactgaaaacattcttatgggtcttggcatttgtccatttgcaatttacatatacatatattttgaacatttatttatcacaatttttctggttaattacacgttttttatgtattatgtatgtaactatttctcctcttataaatttcaaatatttttccagttcattatttactttttacttcaaaggtgatgtgtctgtttctatatttatttattttaggagcagggaaagagaaatggaacaattctttccaaaataaatatttgcaatatgacacacacagacaaagacacagacacatgttgagaaagactagaggatattttacttccactccaggagttcagcataagctataccacgtcaagcctaactggccaaatgcatcctcatcttattagatactatagagtccatggaatcgagagagagtctgcactgtttacaccaggaatatgaccagacagaaataaaacacggtaatccctaacagaagttgtaaagaagcaatgtatgtcttcagttcccctctcttccatgcagttctgaaaacactatcaaagatttcatttaaaaatttttccaaataaccccatttaaaaaatgggcaaagacatgaacagatatgtcacaaaagaagacatacaagcggccaacaaacatataaaaaagtgctcatcatcactaatcatcaaagaaatgcaaatcaaaaccacaatgagataccatctcacaccagtcagaatggttattaaatagttaaaaaaaatgacagatgctggtgaggctgtggagaaaagggaacacttatacactgttggtgggaatgtaaattagctcagccaatgtggaaagcagttttgagtttctcaaagaacttaaaacagagttaccatttgacccagcaattccattactgggtatatacccaaaggaaaaataaatcattctaccaaaaaaaacacatgcactcatatgttcattgccatgcgattcacaacagaaaaacatggaatcaacctaactgcccattagtggtggattggataaagaaaatgtggtacatatacaccatggaatactacacagccataaaaaagaatgaaatcatgtcttctacagcaacgtgaatgcagctggaggccataaacctaagcgaattaatgcaggaactgaaaaccaaataccatatgttctcacttgtaattgagagctaaacaccaagcacaaggggacatggcaataagagacaccgtacactacctagaggggggatggagggagtggggtatgagttgaaaaacaacctattgggcactatgctcactatgtggatgacgggatccataccccaaatctcagcatcacacaacatacccacgtaacaaacctgcacatgtaccccctgtacctaaaataaaagttgaaatgtaaaaaaacaatttcctcactagctgtaacaggtctttgattgggggatggggtggggaatgtgactcagttttggttttcataaatttaaactttacaataatgtctctccaattttgttctcatgaaagactatctggggaatttgcctaagcctgcccttgccaacagctctccagcattactgcccctctttcccccgaaccccatcaaggtttacgaacaccaatctcttctccctttggttcacagaaatagtcctttcttatatctattccccttagaatccaagggattggtctgataatgaatgtgtgtaagcaaaggagattagagaattcatttgggagaaaccaccactcttaattcatgatcttgaatcattaatttaatgttgggaaattctgactgatgaaaacaagcctttggggcaggaaggctttcaggaattgtttaagccatgacggaccagctcaactccccagtagacttagatctagctattctgaaatcacatttttggttgttgtgggttttttttaaaaagttacttattctaaactaagattgcaagctctggtatgcctagtgctatgcacaatgtctgccacgtagtttgtgttggacatataactgctgaataaataaaggaactcgagccagctccctgggttcaaatgctgattctgccactcattggatgtgtaaccttgaacaaggttcttaacctgtctgtatctcatgtgtaaaatagggataatgatattccctatctctttggggcagattaaatgcattaataaatgtagaaatatttagggcactgttcagcacataaaaagtactaaataaatattattattattgaaataagggagtaagttaccaacagaaatcaagatgaaaaagaagctgctcaggttctctatgcacttatcatttagtgggaaagaacacggataaggcatgaacacaaataaacatggtgtgggccgggcgcggtggctcacgcctgtaatcccagcactttgggaggccaaggcgggcagatcacgaggtcaggagttcaagaagagcctggccaacatggtgaaaccccatctctactagtaatacaaaaaaattagccggcacatgcctgtaatcccagctactggagaggctgaggcaggagaattgctagaacgggggaggtgaaggttgcagtgagtggagattgtgccactgcactccagcctgggcgacagagcaggacttcatctcaaagaataaataaataaataagcatggtgcggccaggcgcagtggctgacacctgtaatcccagcactctgggaggctgaagtgggtggatcacaaggtcaggagttcgagaccagcctggccaagatggtgaaaccccgtctctactaaaaatacaaaaattagccaggcgcggcggcaggtgtttgtaatcctagctactcgggaggctgaggcaggagaatcgcttgaacctgggaggcagaggttgcagtgagccaagatcgcaccactgcactctagcctgggcgacagagcaagactccatctcaataaaaaaaaaaaaagaaagaaagaaagaaaagaaaagaagcatggtgcaaagccaaaggccattaataccaaacaaaagctacaaagtgctgtgggaattctgagaagagatacattcagggcaagaggatgaagaaagcccacatggaagataaaaagtgttggcaatgtctcctggaaaaactgtagatggcaggatggacaacaccatccaggaaatggatggtagattagtgtgggttctctgagaagtagaggccaagacaggattagacatgcaagagatttattggggtaaatgcccatgaaggataaatgagaaggagctggtgaaggcagggagaggatttagaccacgatgcaggtctgacccctgggaaggagaaggggaatgaaggaaggttgagtaggaagtgtcagacttcaacataggtctgagaaggtcttaggccaataggaagtcctcaagccaaagtggcccttcagaggcatctgaagtgtgcaggaacaggcagcattaatactcctgcagtgctcagtaatgggctaagagcttcccaagggaaactaagctttggctcaaaattggtagattcagggagcagcagctggggccatcagtcaatcatgctccccacaacaggagaagcagcacattcttatggctctcatagtcaggcacaagcaatgtcacaagtaccatgcttgtactttcaggcatggttaaggttcaatgaatatgtgtcatcacctgaaatcaaacacaatatccatgggctcctgaactttatcaaaagggatttttttaacttaaccataattgtaatatcaaaatttgattactactttgtccaggcatggtggctcaggcctgtaatcccagcagtttgggaggccgaggcggactaatcactggaggcgaggatttcaagaccagcatagccaacgtggcaaaaccttgtctctactaaaaacacaaaaattagccaggcatggtggcacaagcctgtgatcccagctactcaggtggctgaggcatgagaatcacttcaacccaggaggcagaggttgcagtgaggcgaaattgcaccactgaactccagcctgcgtgacaaaccaagactccatctcaaaaaaaaaaagagattacaactatttttaaaatagctgtggcttcagtttctaaaacaacataaaagacataaaatggttatgaaacatcacttttctgaaaattaaggctaaaaccctgaattgaggattcagaatgaactcagaaacaaatctactaagaatctatatggtaaatcctttaaatgacataatctctctaaaattcctattttaactttatcaaattctcaattgctagattttgctagcggattctggatcctctcacctgaaaatgctatttgtattgacacatccaggaggctttaactatgtaaagataacctgtattagagaccacctaaaatacattcacaaatagatatttaataaatttcttttataattaatatgaactgattgcttaaggtagtaatttgattaaatgagactatgagaagacattttgcaaaagtgtaaactggtacatgaacatgagatatcaacagagttacattttatatgcggttaagtcacaagaaaggcaaaagtagaaaaaattaaaatgatcctttaactctggagtcatacccagcagggggatgttctcacaatgaaaggcataaaggaaagaagactatggacgacatggcgggttcctatgtcccaccttaggtccactctagggcacatgttcattgagtggaagggcacacaacatctgtgctacttaaactggcctcattctatatagattttccgccttcttgatgaatatttaacataaacgttaaatgcatttttcagtcactccctaaggaaaaaaaacaaagccttccagataacagatgtcctttttttaagaggttatgtggcacagaagagggagcaagacatattcaagttcctatcaccacatgagtaagaaaactggctcagcaaatgacttcacctgctaccttcacagagggtacagaagccatggtgtgagaactccctccatgtccccatcatctagcaccccattcctgcttctttcaagtggccttagaggaagaggtgtccctcttgttaagcctgatctcccaccccaggctctcagtctcactgcagatcacaccgttctgcattattatcccccgtttcttcagttttgctcttcattagctacttctcctatataaactcaaattcctccagttctaaaaaaatataaaagtcaaatctccatatacacaaacacctccatgttaggtactctttcaactccaagacccagaaatatgactcaagctagttaacatgttaccagttcctgcaactgagcagctcaagaaggtcctggcaaagacatggccaaactcaggactcatgggcttcctctcactctccacctctctattgtcattccctctgagagtaggattcaatttaaggcacatgctccccacatggtgggaaaaacaaatgccagcagcccagactatatcttcagggcttgcaatccaaaggaagggagctctctctctcccagcatctatgtttcaaatctcagaggagaatgggattctcagacactaaatgggaagagataggatgtggctcctcttctgcttaaaacccttcactggagtcccaacatctacttacgccacaggataaaagccattgtgcacttaactccatggtgctacacaccattacctttgcacaagctcctctctctacagaaccctcatccccaacttgtccatctggtaaaatcctttatccattattcaaaacctacctcagacctaagctccctaaagaagcactggctggtgtctccaggaggctttgctgctgttcctcctctgcacctgtgcccacctctatggttccaccacactcctctgtgccactcaaaaccctcacggtaaatttcattgtttacatggctatttctcctaccaaaccataaatcctgggcttgtgccttattaacatccaaacacagacttacttatatcaggcatgcactcacacagtctttaaaacaatgtttgtgacttgatttttgttgttgttgatacagggtcttgctctgtcacctaagctggagtgcagtggcatgatcaaggttcactgtagccttgaccttctgggcccaagtgatcctccagcctcagcctcccgaggagctgggaccacagcacatgcaaccatacccagctaatttcttcattttttttgtagagaaggggtctcactatattgcccaggctagtactgaacttctgggctgatcctctcacttaaccctagcaaagtgttgggattacagccatgagcaattgcacccagcttgatttttttttaattcaagtacaagaatagttgtttaataccttatattcgttattcttaatttcacagaacaataatttatatgccttcttttaaaaaatttttaaaattcaaattgaaacaacttgctattttgaaagtcaagttttgttgttgttgttgttttgttttgttttgttttgtttttgagagtcttactctgttgcctaggctggagtgcagtggtgcgatctctgctcactgcaacctccacctcccagattcaagcagttctcctgcctcagcctcccgagcagctgggattacaggcacgcgcaaccacccctggctaatttttgtatttttactagagacggtgtttcaccatgttggccaggctggccttcaactcctgacctcgtgatctgcccacctcggcctcccaaagtgttgggattataggcgtgagccaccgcaccccgccaaggttttttctaaataaaaaattctctatagttttatattgataccccgtttggtaaccaaaaatcagtactctacatacctagtaaaagtattatgcctgtccacaaataaagtacttacaaaataaaaatccaaattataaaagtttacagcaaaatattctagacctaccaattatctcccttctcagagtaaaagatggaagccaacctttttcagttatcttaaacgagtttggacatttaccctgtgttcacttttctcacatcagaagtctagacaacctcaagccttagagggatggatggtgtatttgtgctacatatacgtgtccaaagttccatttacattctagaggttataaatgtaattgatgaaaaaacagcaaaggaagcattacgacaaaatcactttgtaccaaataaggtcaacagagagagaccatactaagactgcctgaagagtttgaaattacacctcccagctttgttctagttgtagaatgtccacgtggcattaatgtccacgcaaatatttatcacctgctaggcctgccaaggttacagggaaggcaatgaacactaaaacaccggaggagattgtttatcgtctgcccatgctcaaatcaaatatgataatcccaagtctccctagaaaaatgcagaaaaatggaccagaaagagagaggccaatatcacagcaacatttctgggaggcatgcaaaaactgttgtgattttgtttctatgttatcattcattctactagataaatacattttctgatatgtaaatttccttttgaatcagataactagcagaagcataacatggccttcataatcagataagtctcagctttcccacttgctggcagacaagtagctattctcactgagcttcagtttcctcagctggggataggaacacttcctttgtcacagttgcaaaaagattcaatgatgtcatgatgataataaccaataaaactaaatatatgatagcattctatcatttcattaaggtccagatcccatgtcccacaaccccccagacacgccacttggatcttgccttttcttaaactcaacatgtagaacaccaaactcatcttccccgtccttgcccaggatcccttcccccttcccaattgttctcactctgtagatgacactcctattatcccaaatacctaccaccaattatcaaattataaaaaggtgtttattggtagtcagactacagtgaaaatggcagcctcaatccttgctgctagcagggccaatggagcaacacttagaaaagcactgtgaaacaagtcatcgaatgttcaaacccagcaatcttacttcaataaaatctaaggaaatatcgaaaaagctgcttctcaagatgtttactgcagtattacttctatcaggaaaagggaaggaagaaaaaaaaggaaagaaggaaggagagaaaagaacaaaatttcacaatccaggaaatggtaagctaaattatgggatatggtctcaacaaatgtttgtacttaaaaatgagaggaacaaaacatcaaaaatgctaatgataaaataaagacaacagttacaactgtaagtcaatttgttcctacctagagcaacatgagcaacatatgcacaaaaggaactatacgacaatgctatgttttgctctgtttgtatatacagcatttgtgagagacggttctctactctctggtccaaacccaggtcacttgatttgacctgagtctggcttctgatcccccagccagcctcagcttctgcttgtcaggctactgttccactccttccccaggaacctaccctacccctggcctatgcaggacactggggacatcctctgggcaagggtcctcagtgcccaacaccacacctcgccatgttacttaccatcactgtcatgttacttctgccaccagctcttccatcttcccctggttgtaattgaccttcccctctactttcccagattctaaccttgctatgtccagtgtgcagccactagtgacatatggctaatgagcacttgaaaaacagctagtgtgaactgatatgtgctgtaagtatacaatatacactgaatttcaaaaacttcatatgaaaaaaagatgtaaaaaatactgatagcattttatattgattacctgcagatataatatatattaaatacatggagttaaataaaatgcactattaaaattaatttcacctgattctttttactttttaacatgtggtcactaaaaaagattaaaattgcacatgtggcttacattatatctctattggacagaactagtctaaccattctttggaacccagcgtaagtaaaacgttgatatgatttggctgtgtccccatccaaatctcacctggaattgtaataatccccatatgtcaagggccgggtggagataattgaatcatgagggtggcttcccccatactgttctcatggtagtgaatgaatctcacaagatctgatggttttataaatgggatttcccctgcacaagctctcttgcctgccaccatgtaagacatgactttgcttctcattcaccttctgccatgattgtgaggcctcccgaggcatgtggaactgtgagtcaattaaacctccttcctttataaattacccagtctcaggtatgtctttattagcagagtgagaacagactactacaaatctccttaaagatgcccctatttttatgacattcttaattatctcttttgttctctgaaatcctataatggattctaccatatacctgaccatctaattacataacacaccataaatttactattattttgtatctattcttctcactacatcaatgccagttctatatcctaatttaggactcatagtaagcactcaacttttaattagaatctggccaggcatggtggcttatgcctgtaagcccagcactttgggaggctgaagtgggaggatcgtttgagtctgtgagctcaagaccagcctgggcaacatggcaaaaccccgtcttctacaaaaaatacaaaaatctggccggacatggtggctcacacctgtaatcccagctctttgggaggccgagtcgggcagatcacctgaagccaggagttcaagaccagcctggccaacacggtgaacccctgtctctactaaaaatacaaaaattagccaggcatggtggtacacacctgtaatcccagccactcaggaggctgaggcatgagaattgcttgagcccaggaggcggaggttgcagtgagccaagacggcaccactgcactccagcgtgggtaacagagtgagactccatctcaaaaaaaaaaaatacaaaaatgagcctagtgtggtggtacatgcctgtagccccagctactccaggggctgaggtgggagattactcgagccagggaggccaaggctgcagcagttgaggcaaggtcaaactactgtactccaacgtggacaacagagcaaagatcctgttaaaaaaaagacatggaatctttgctggagcaatatggtaatacacagggttttttggtttttgttttgtcaacagtgtaggaagaactggaagtcacaggacctaacagctcttcgttcttcctctaacataagtaaaccgtctgctacatggcttgatacgtgtcaagcctgcctgtgcctcagcttacccctctgtaaaataaagttaatcataccagaccagtctatagccaggtgaaagtatctacatccaaattggagttattaccatgatactaagaaatactctacttccacagctaattttatgtttctcacccagttgttttaaatacagactactttttaggaaaagagaacaaattcatcactattatcaaaaataagaaagacggagaaaaattacctatcaaaatactggtcctatcctattaatggtgggagatatgtaatgggaaagaaactgttaaaggcctacttcaagctgaagtcatttattcatcatactcacaataatcctttaaaaagcaaacattaccatacccattttacagagcaaagaaaccgaggttcagagacaggctacgtaactagctcaagtcatgaagctgcaggcggcagggacaggctgcaaatacccaagtaagtggcataatctttgcatacttaaaaaaaaactttattatcacttgaagataaaatatatgaaaagcaaaagtgttatataaatacacacataaaaatacaatagtaattactattcatttccttcaaatagtttccttaatcttggcttaattcctaactttcagttcaagaggcctttgttttctaagtagactttttttcgagtagcaatgaaatagaatatgtgattaggtaggaactagtgcattacgtactactttttaagtctttaataaatcacaggagcaagtgaaagtttacattaaatattatgactagaattcctcagacacattttacaaaaatctagtccctacaaagatcacagtaataaacaaagcaaactgggccactccactagtaagtatatcaacaaaaaacatacacctaaggaaatataaaagaacctctccatgttacaaaactgaggtcatgatgagttcagtgaaatgataaaagaaagttccctaaaataagacctacaccttagagtgaaactacaattttacaaacttgaaaagaatcaactttctcagaatgggaacaatgtactgtgtgctaagaaataacctgatctaggtttacttgattctgcctttataaaatgtagccaacttaatcttgcagacctggacagaacaaaaatttaaacgctaaagcacagaaaaaggctcaaagtatcaaacgctttaaaacacagctcaactctcctttatcaaaaatgtccctgcagtaggtgttaatcagtcactaccaggaactccacacaatgcaacctgtgtattgtgcaacctgtgcgtgcatggtatctacaggaagtagaaaattcagtttaccaagaacgccacacttcactctccacacttcactctcaaaagtcttgaaaacgaatccctgtaacagcaactaatttacatttcatttcaaactgaacaagtcagtgtaacctcaaggtatgtgagattgtgaataacttcacttggcaaaatcaggtgtggtttggtttggcttgggttcttctccccctcagaggtagaatataaatagaaataatcagcaacttctgatctcatgaacaagatctttatttaaaatcttcacacgttaaatcattttatgcaatattctttcaagtgacagacacattagcactaggcgatttttgtgaattttgggactaaaagacacctggaagaaacataaggtgttctttccttcgccaccaaatacacaggtaagtgtgtctatagatagcaaaggtgttttcatcccaaagaaaagttaagacttaggatgtaaaaaaatacagaaaacaaaacatagcctaggcgaaccagctacagatcacatgcagcaggtgacaggaagccttgtggacacctcacacccacaggggcgagcttcatcacaggtcaactccaagcccacctgagctcctcagaacctccacctggcaggccataaaccagaaggtggcagacagcatcactgtcatgccggtaataaaggagaagcagcctccctgaacccaagaaaaccacccctctctccaagcaggaagagaaggccccttcacaccaaggacacaaagaaactgaagcagccagacccaaaataaaaattaaatttaaaaagcagcatgggaagacagatgacaaatctgtgctgggatcgcctggaatctcggtctatatgggggtctcacactcaaaagtaaaaataaaatttaaaagggggatgacagagatgagagcccaattaggtctgtgctgggttcacttggggtctcggtctacttagggtctcagactcaaaaataaaattttaaaaatgaaagggggaggtgacagttcaatgtgtgcacgtgatgaccacttgggatccagttcacttgctgggaggacaggggacaggtacctctgtgcccggcctccaggttctccgggagcgcaggcgcccagcgagaatctgggctaagtttaactcgagggcgacgggagcagtgcccgagggccaggctgcggctttctggaaacaaagccccgggggtccaagcccagatccagggaagggggtcggacgcccacccatccccctccccagcctcccagccaccgacccctgcacagaggagcgccctcccggcaggtgcccctaacccggcgccccgacccccgcgcccggcgcgcgcctcacccagcagcgcccgcaggtgcttcaggcgggtcagcacgtccttcttcgggtccagcaccttctgggtggacttcttcacatccccgtggctccttcgggagaacatcccgcggcaggaagcccgggccccgccggcggggcagtaggcgcctgcgccacgcgaatcaaagcatagggtcgaggccggcgcgtgtcgcgcgggccactcgccgcccccagccccgctgctgccgccgccgccgccgccgccgccgcctcagctgtgtctccaggaaggaggggcgggccggtcacggcgaggggcggggcaggaaggcggtgtcgacggggaaccgaaggccccgccccgcgggaggtgccggccggccccttgggcgctacgcacgcgcacacaggccgaactctcctggcgggacactagcccgtccgcgccaaaacctagcggggacgcgctcagagggccgagaaggcgcctcgaatcacaaaggagcttctctcacgcacacgttgtactacaagtcccgagatgcaccgcgagacagtcctccaatcaggctggcggtcttcggcacgatgggagtcagtgggccggcattgggcacgtcgccccgccctgccgcgggccgcaagtgctcctgggaaatgaagttctccagcaggcgacgcgctgcgacctcttttccagggtcgcagaagcgcagggcggcctctgtccgtcccctgccccggcagcctagatcgcccgtggtttcactctccctcctgcgcgcccaccccattttcctctagtgcaacgtgaaccacacacgcccaaaaatctcagtaagaaaagtgtcaaggcttttcaaatgcaaactatttttaggtttagcttctggattcacacaagggagcgagtcgaagcccctctgaccgtgccgaaatcgcagctctaatttcacactaaaatgagttgctttggcactagggaagagcgtgccccggtgaggagttcagccggcccctaggttcctggaacccaacctcacttggggtatggaggtcgctcgctcagagggctccttgggatcttgcctctttgtaggaagggtgcgttctctgttgtgcaagccacatggcgatccagtagcagaaccagaaatagaacctgagggatctgactcaggcctgtatactttttaaagccaggcgcttattccctggggcaagactttgagctgaaagatggtcaggagatttcttacactgtaggattgtatagtggcatccgaatcctgcaagttttgacatcctttcagctttttcagcaagtacttaaggtagaatcacgtggtttccatccaaattgggacaacacaactgtctttttctcctctagctgaactgtaacttgagggaagagacaaggatttacacgcctttgtatccccatccctcagcacagtatttggcccatagggtcactcaataaaagtttattaaatgaaatacaataaaaagctaaagtagtcctacatatttcaaccaggcaggcgaaaaggaaaaaataaataaataaactcacagttttagagcgtctctctatttttagatttgtgtaatattcctttgtatagacacattcatacaaaggaatattactcagcaataaaaaagaacagactactgataaacccaataacatggatcactctcagacccggagatgaaagccccatgctcaagatgatggcagagcggccctaccag

SEQ ID NO: 500 - DNA, 320095 bp, Homo sapiens
  source 1..320095: mol_type = genomic DNA
tccttacctggaaaccttctttgcagaaaggcattttcagaaagcttttggtgaccttgaaacattctcaggtgctctctgatgtctttataaatgaaacttaatatatataggagatacagttcctccttcatacctgtatagtaaaaaagccacaacataaatacctttggttaatctttctatagtatattattttaaatattagcataaacatgatagaaattaacagaatgaaggttaactgggggaaaagccctgagcagggagggaggagttgctgtgggaacactgtggcaggtctgaaactagatcctggctatccagcagagggaaatggcacatatttggaggcttttatatcatggtaataattgttttattaggatcaaagcatcccagaaagcacttgctctttccttctctccagtccccctgactctcccctgagcagggttggataggaggtttggtggggggaggaggcagggaacagtagaagaaagcaatgctatgtccctttcccccattgtctggccccaaatgtagtgccataaatatcaaaacagtgcttggtaatagtccaaaacatttaacttgtccgcaaattcctaaacaaccattggcgtgtaatttggttcttggcagagtgtaactgaataacttgtagacatgacatttgtgtgaacatctacaagagacaggccgttatcaccacccattcaacactccagccagaggaagaacagcaagggggccagccatacaagttcacctgcgcgtccggggtctcggttctgctgtggcccggctactccccattctcaactgtgttttcttcaccatgcaggtgatggaagcccaggcaggcccagggttcaaggccagtgacttcagcctgtcaccccctcagaccacatcgggcccaccggcctcctccctccctgcccctcagccctgcccgcactgccccccattgcgcccagcccttcctcaccccgcaggagaagctggcctctcattcctcactgagagactcgacgggcgtccccacgccaagccttcctcgccctcccctccagccttttctgaaggggagacagcaaaggtgagcaagcaaccgccggcaagtttcgacagctgctgaggaagactcatgggtttctaaggaaacagagaggcagcagccattttagtagcatttgctgtatgaaaaatatatagacactggcagccctctccccactctgccttggcgcctgccctcccgccccgcctcagaggccccggggtgagggtggggccccagtctccgagggacgcagcggacacctgtcgcaggtggccggccaccggggtcgccacccccagtgtcccccagcagcgggaccgcggggtccccaccccggggcggaatccccacccacgggcgccgcagtgcagcggcgggcgggcgggcgactcggccctccccgcacccgcgtcccgccccccgggtcccctccctctccccaccgccccaggccgcgggagcccgcggggagggcgggcctgtcgcagccgcgctggtcgccaggcgtccgggaggagcggggtccgcgcggcggacgaggcgggggcggaggcgcaggcagagcgagcgcgggaggtcgccgcagccagggacaccgcgcgccgccgctcaacatggtcgctgcgcacgctgcccattcttcctcctctgccgagtggatcgcctgcctggataaaaggtagctcgccgggggccgcagccgggggccgagctctgcggtgctgcccgggccctgagaccgccgcagctccgcacctgggcgcagcgcggccgggctgcgggtggccggggtccccgagcgggggaaggggttgaggtcctcgtccgggagacaggaggacaaggatccccgcctctcgtggggtgccagcggcatgagattattacacgtggtggagaaaatgcagcgcagtaaggggagagagcacccacctctccaaccccctgccctgccgcgactccaggctccgctcctgggtgggggtttattttctcttggcatcacgggacagaagaatcgatgcataccctttccggctattcagaccttgcggggtatgaagttttaaagaggggtgggggcaccggcaggtgcagagtaacattctttttttgttcttgaaagcaaagtgtgagggacccggtggagctgtcgaatcccttgctgaaattcacagctctctgcccccgcagtcgctcgctcaaggtctgtgttagagaaggtcatttgggaggctgctttcgtcttaatacctgcttctcgggaaaagatctttacgctaaaaataattaaaaccataaagcatgtaactcccgacgacagctctctctaaggaggatgtgtgtgttaacagtggattgcagttgtttccaggctgtgacagcataattttctgtttgtccagattgcaggtttaaacgttacacagtatgttagcaattatagcttattaccctgattaaaaggtgatgcatctgaacttttaagaactgagcaagaaatcttgcagagtgaactgcctctgaatttcggagtttgatgcagaagggcaatgatgcacgtcttgcagctatctgcatgacatctctatttgcatttgtgtgaaatattttgtgctctgccatattgaaaaattttcaattaacagattcgtaaccagatcaaacttgaaaatcttaagtgtgacgtgctttgcatactctattataggcctttgttgaaaaatattaagtaatttgagaaaagctaaatgtagctcatttgaaaagcttaatatatctgagaaataatcttgactttcaattaccactcagtagcaagattttttggcaggtagtgccctatttatgtctaaaatgatatgtactaatattaaaagagttgcatgcaataaatagtaagagaattaaagtaatagttaaatcacacaggattatgtagaagaactaagagtatttaaagtatagaggttgttaatgtgataagtatctacatttaatagttcaggaaaaaggaattatatgggattcaggatcttgcacttaacctataaatagtagtgcttccttatgagcaaaatttttagataataacatatttctatgtgtagaaatgcatggcatggcattttttgaacagtcggtaattcactggaaacccgttagtcaataagaagtacttatggcaaaatcatagagcaatactaacacaagtgggacatattcgactctctcttttcataatgtgtatctgcctaaatgattttgcttgaaatggattttttagagcatggtgcccccatttaatgccaccattcataatgggaaaaaaatctaggaaaaaaaaaaaaacccttcacagatactgagcctagcatcagaagagtcagatgagtggatagatcaataagttaagggttttaggcacagagctgttaccagttctgatattggacatgtcacttttacttccttgagtgtctgaaaaatgaggataggactatcagggataagtggacaaatggaaggagaaaaaaaaggtgaaatagtttgaaaactgtgagtgccatgtaggctttttgttttgtggtattaaaagaactttgcatgttctgcagtgttcatgccagaattaattccaatgaggaacagtttagggcagcaatctcattgtatgaaggccatggggggacttgttttgaagttgtgtttttacttagattgtttatttatttattttttttaggaaaggagaaaggttgagagtgtttatggaagttggctagggaagccccctgaaacacctgtttagtggagacactgccctcaatgtttctgagaaatgctgtcttgatcctcttttccaggcactgtgaaatgctatcttgatcctcttttaaatgctatcttgatcttcttttccaggcactgtgctgggcactggggatgcaacaaaatatgagagttgcttgtaggcttagagggtaggggagattggtggtgggacggctctataaacagctaaccacaatgcaatagtaagtgctttaatggagatgtataaagtgctttgggaatgcagatgagagagttatcgagatacttccataggtgtcctgcctagaactcagaggctgagaacaattttaccaggcacagaatagggagggcatgccagggagtggtgtggcatatgaatatgctaatttcttcccaaccacaaattcctcttgtgaccaaatctagagtataggaatgtatgctctatttttataaaatcttttttattatggacattttcaaccctgcacaaaagagaaagtacaatgaacccatgtgggttcacttgggaatatgatgctgggacctttcaactgggaaaaggacgtaactgggaaacacagttcaaatatatgcctcattcaagtgacaactgttgtggatggtgaaaaaaagagaaaccctgggactggaaataaaaagagagttaaaagagaaagtctgcagtagtaaagaagtatacaatgaaatttgaagtgaaacaaaacacaaggaaaatagagccttaaagtgtttgttaggaatgcctagaaagctatcatagacaggacaatatttgcaagtggggaagggtgttgcaagtgttgtagatatgtagattagattaaagaaacaaaatctatagctttttatgtatcaatcatccaccatcttggactatggtgggactgaggagatgagggtctacaaatactaatcttaaaaccagaaagacaggacattgaacatttggatggataaaccaacattgaaaaaagtctcagcagatgtattgttagagtaaaacaagctcaccactatctcagggatcttaccatttttttctgaggggatggcaactaggaacaaattacatagttcccactatttgggacttaagataggtaaaatgtcctttcttttttttttttaagtgtgctgaccattgtttaagtttttttgtttttgtttttgttttttgagatggagtctcactctgtcacccaggctggagtgcaacggtgtgatcttgactcactgcaacctccccctcctggtttcaagtaattctcgtgtctcagcctcccgagtagctgggattacaggcacacaccaccatgcctgcctaatttttgtatttttatagagacagggtttcaccatgttggccaggctggtcttggactcctgacctcagctgatccgctcgccttggcctcccaaagtgctgggaatacaggtgtgagccaccacacccggcccattgtttaattttaatgaaaatatttttcccgtaagattttaaatttgccaactgtgaacttcagatccacttataagtcctagttctcagggttggtaaaggagtattatgaagggacagggaccatacacattcatgtagtatagcgactcattgctggcattcatcatgatgggacaggcattgacaagctatggcctgtgggccagatctgacagcttgcccgtatgtctcgtgggctaagaatggttttcacattcctgaatggttggaaataaatcaaaagaagatcagtattttgtgacccatgaaatttagatgaaattcaaatttcagtgtctataaacaaagttttattggaacatagccatgctcatttggttacatattgtctacagctgctttcccgctgcagtggcagagttgagtagctgcaatggagactgtgggcccacagagcctgaaatatttactatgtggacctttacagaaaaagtttgccatcttttgttatagatgaaagaacctatctaagtgattgacagtgaaaccactggagatgaaagaaatcgttttcatttggaaaggagttcacagtgtttggtttcttgttctttaattagaagtataggttggagaaaggttctcagttgattggcttatttgaggaacactggccgtcacagccaaagcagatgatgaagttaacatggttattcaaaaggttgtgatctttcaaaggcagcagatgaattttttttaagtattcgtgtttcagtttaaaaatactccatggacagtttccatctgacttgcccccaaatagatgttattttagctattttgattaggttgaattcgagtgaaagaaatcaagaaacaaatttgttaagaaccaaaatgctttgtagcacacatggtgagagaagataactcagatatcaaagaagcatcagacatgggtccacccttgagaaatgcagaggatcaaagaagcacacagagcagaaaggggtccctggaggaggctagtatctactagccatgtcccaagggatgacattaccccggtacatcctccagggctcaggctggtcttgcaatctcagaatactgacttgttagcacatcaaaaattaatgtatctttcagcaacagatacacaggtaccagactctcagagactctaaaagccagaaagacagtttattaatttgacaataagatctgtcacatcagagaagtggacactcacgtcctttggctaatgtattcttcctctaagtaagccatatgggaaatccaattattctcagaagtccgttttctgcatttacaatgagaagccaagctgccaggaggtcaggatgcttacatcttctggcctgtacaggagtacatcctcttcctagagcaacagagcctgggaattggatgataatgagaaggcagttctgggaatcgtccaggacagcgtggctgccaccttttccagtcagatcaccattacctgtgctctcacagcacactttggtcccactctgtaataacatagcacaagtccgattccattgtaatggcctgcttacttctcttttcacatcacttgactttagtccctatattttattcatcattttatcttcagcttcagtgcagtgccctgactagagaaggtgctaatgggcccagggcaagatggccacaggcatccttctcctcagggatggtggcctctgtaacccaaaaaggcccttgcactgggccctttgctggggaagggcgtgggtgacaccatccacatctgcctctgttgcttcttctatgttttttggctaatgtgaatacttttttaaaaatgacactgcatagctctaatctaatctattcttcctccttaaatcctcacccacctttgaaaaaaaaactaacatctttttattgtggaaaaaatcaaaatatacaaaaagaagaaatagcagtatgattcttaattctttttgtttgtgtgtgtgtttttagacagggtcactctgtcacccaggctggaaggcagtggtttgatcacaactcactgcatccttgacctcctgggttcaaacgatcctcctgcctcagcttcctgagtagctgggaccacagatgtgtatctccatgcctggctaattttaaaaattttttgtagagatggagtctccctatgttgcccaggctggtctcaaactgctgggctgaagtgatcttcccaccttggcctcccaaagtgctgggactataggcttaagccactgtgcccagccagtatgatctgtgccaccccttccctggctccaacatcatcaacttacagccaaccttgttttgtttataccttcacgcgctccccactccccccaggattattttcaagcaaatcccatgtatttcatctgtaaatattttagtatatgtctctaaaaggtagtgactttttataaagaaaacaataccacacacattaaacaacttgacgttagttctctaatataatcaattattcagtcagtgttcaaatgtccccatttacctcataactttcttttttgcagtttgtttgtatcaagagccaaataagttgcatttagttgatatgtctataggtctgggttctctctttctctctttttcttccttgtaatacatttcttgaagaaactgggttgttgttgtttttttcagtctgaattttcattgtacctccatgcagttttttaaaacatgttcctttgtcccctgtatttcctgtaaattagtatttgggtctagagtttgactttttggtaagaatgcatcacagaagtgttatatatttccataatgaggtatataatgtcaagtgatctcttttcataatgttagcaatatattgtttttaaagtttaatgcttgggaattatctatttgcaatttattgggagacatttcactgtggcctcaaatacatgggagcacatgacatatatatttggagtaatttgagaacaatacaacctcatatgtaattagggttaaattctgttgtgctgattttacttgctttaatctattaggaaaggaaagtttagccagacctggactccctcagactggggatacatgtaggattggtgtgctcaatccacacccttgaccctgctgcctggtctcctgcatgcagcctgggagctggaaagagtcttcagaggaaaagtggtgcttagcaaagcaaatccagcctctttgtcttagttggagttctctcaaatggatttctggcccctcctgtgaggtgggactggcagataccttttgttggaatttcccatgagcttagaagattttatggccctctcatcgtagctgcttattgtcctgcaccacctcctcacaccccatgcagctagtttttcttcagtcagaataaaatcacgtttgtgcatcctcaacagtggtcaatgagagtgggtttttcctccagtactttcacgtcacagatgagggagagactgccctaggagtactgagagactgaggaaagagaaagaggatggaaagaactgggtggggagggagacagcgagagatccagctgaacatctgacagaaaacaatctggctgacgagcggaggcggacaatcctggtgtgttgactcagctgcatccgtgtgcaccctcttgcttcccctgccccagaagaaacacaaagtgctgccactactctcttttctctccatgccagctctttcttggcgcaactatctgtttcctttgctgtaactgctcagattccttaaactctgtatctgtggcttatcttctagaccagatgtatttttgtctgttggatattcccacatgaatatcccattaatattttgtggggcagacattgttttccttcacctacctctgctatagaggctagaaaaacaacatagttattttcccaatcttccttcaggtgaggtgtccatgtggcactgtctggccaatgagacatagcagaagtctacaggaggcttccagggaagctcttgctttacccgtgtatttgatttccccttcctctcttctttctgcctggagttactacccgaggcccgggcctgtggcagccatcttgtaatcccaggagcaagtgcccagagaaacacagagcccccagttctgactttgtccacctgctgaacccagatcagtagttacccaccttcagatttttgttttgtgaagaaaaaagccctatttctctaaagcattctttgtttggtgttctatcatttgccatcaaaatgatctctaacctaacagattgatacttgtctaaagttgacctcatcttttttagccctgctccccatttgtttctccttcttgctttactattttatttatgatgtcatgacttcctcattctcagaactttgaagttatctgcattttccctttcctatgtccttttccacatctaaccagtcactaattgtcttgacttttattccacttttatttcagggccttagcatctggatctccccgttttctgtttccagtctggaaaacatgatatagtcaaatcagctttgtcttaggatcagccagacctggattcaaattctgtcacctctaccctctagctatgtgatcttggccaagttattaatctttttgaatctttgttttcacatcttcaaatgagattcccagtgcctacagtaatggctatgttgaggtgtgtgagctaatgcaaacgttgcgtggtcatctctagagagaaaatgtagtgtagaggttaaaaatttaggagtcagactgtataggctcaaaccccagttttaattttattgatggtgtaattttgggcaagttatttggttctagtagttactttatagattcattgggattttccctgtagacaatcttgaatgtgaatactggtagttttacttattctttctgatttttatgtcttctattatttatttttcttgccttattgcatttgccaggaatgccaggacaaaattgaatagaaggggtgagaatggatgctcttgttttggttatgatcttataaaaaatagtttgctattttgccacattagttgtctttcatgtagttgtttttttttagcaaattcccttttctgaaattattgagatgattatattatttttctgttttattctgtaaatatagtgaatttacattgtctgaatttcaaatgttaagccaaccttgccttcctagaatagatactactttgtcaacatgcattatactttttatatattactttattcaacttactaatatttcattaatgctactttcatgtcaattcatgagggatattagcctataactttcttttcttattttagtatcaggattattctggcttaatcaagtgaattaagaaacatttccttttttcctattttttccctctatttttaaatgaacttatataagatcaatgctatttattttacaaatgtcttatagatgtcatctgggccaggagttttctatatgaaaagctttttaatgacaaattcaaactgtaatagaggactgttcagattttcttttcatgtcagtttttatagttatttcaaggagtttgtccatttcatctaagttatcaaatttattgacatagagttgttcatagtattccttataatccttttaatgccattaggatatgtagtgttgttctgtcctttgtatcccatattggtaatttgtgtcttttttttttaattcattcttactaggagcttcccaattttgttaatattttaaaagaaacaacttttagttgatttactgttttctttgagaaatttattgatttttgctcatttttttttccttttttctccttactttgggtttaacttattcttctttttctggcttcttaaagtggaaacttagttggttaattttaacctttcttctttactaatataagcatttcagcttcaatttctcattttcaacacaaggaagcacaggtatttttttattcagtatttgtaaacttaaactatttctgctggagaagaacaattaatcaagctgatactgggacctcttgactccctcagcctcaagaatatactttgcaatgtggtgaacaatatcctcaacaacattccaacagtgattcagcagtgagtttcacaggctctttaaatacagcataattctaaagaaacattaagaaagggtaattctgcgagggggccaatataatatacagttttcaggtgatctgatttaatccaaggaaagattgtagtatattttagaaatagatggattgtgtttcttactgaaaatccactataaatattgttttttcgcatttgagccgttaacaatgattatgattgagttgcaatgactttgaagtaatattttccaatagatacctggaatcattctattctgtgttgttggctgaatgaagagtaataagactttggtgtcagccaaactgggggaaaattacattcttgtttggctatcatttgacctttatattccattgctttatttcatttcatgtataatttggtagccaaacaagaatgtgtaacttaatggtgttccgtctcttctctgtgaggatgtgggggcacgggtgtattctcaaggaggaatattggtgccactctaacaaatagacaaatggtggtcaagagcccacaggtaatgctacagaacatagcccctctaattgcaactgtggaaaccaagggacatatgttaattgcactggagtaatcttaaaatgcttatccgtgagtgaaataattttctaaaaacacttttattgaataaaattgattgtacaatgtaagcatatcaaaatggatgacttgctgtatagaaatattacttttttcttttttttttttgagacagagtcttactctgtcgcccaggctggagtgcagtggcatgatctcagctcactgcaaactccgcctcccgggttcaagcaattctcctgccccagcctccccagtagctgggattacagatgtctgccaccatgcctggctaatttttgtaattttagtagagacagggtttcaccatgttggccaggctgatcttgaactcctgacctcaggtgatctgcccacctcggcctcccaaagtgctgggattacaggcttgagccactgcgcctggccagaaatattacttataaattggtgaaaagttcaagaaacccccccttaattaaatggagaaataatttttataggcccttagaaaagacttaatagttgagatgttgaaaacaaatagaaaagatctttgatgagaagcagatattactcacaacttagtaacttgattcttggtattatgtgaaatttcaattctgtttataccctggatgaaggcattaatgttttcccttgtgtttggggcagcgttagaacagccttattcttctagtcattaatttttcatcttcattgaggcacaattgacaagtaaaaattgtataactttaagatgtatgacttgttgctttggtgtatgtatacattgtgaaataattgccacaatcaagctaattaacatattcatcacctcatatagttacctagtatgtgtgtgtggtgagaacacttaagatctactctcttagcaaattgcagtttgaaatacagtattgttaactatgttcacattgttgtatattagatctcctgaacgtattcatcttttaattttaattttaattttattttttgagataggatctcactctgtcacccaggctagagtgcagtggcacaatcatagctaagtgtagctttgaattcctggctcaagcgatccctctgccttggcttcccaagtagctgggactataggcacctaccaccatgcctggaaaattttttatttttagtagagacatggtcttgctgtgttgcccaggctgctcaaacccctgggcttaagcaatcctcctaccttggcctgccaaagtgctgggattacaggcaggagccactgtgtccagcccagaatttatttatctctcataactgaaactttgtaccccttgaccaatatctccccatttccccttcccttcagctcctggcaaccatcttctactctctgcttctaggagtttgaatattttagattctatatgtaagtaagatcatgcggtatttgtatttctgtgcctggcttgtttcacttagcgtactgtcctttaggttcatccatgttgtcacaaataccaaggtttcctttatttttaagatggaataatataataatattcattgtgtatatatacaccacattttctttttccattaatctgtcaacagacatttaggttgttttctttcttggttattgtgaataatgctgcaataaacagagaaatgcagatatctcttcaagatactcatttcatttcctttgaatatgtacccagacatgggcttgctgcatcgtaaagtagttctaatcttaattttgaggatcctccataagttttcaataacatactaatttacattctgtattagtctgttttcatgctgctgagaaagacatacctgagatggggtaatttatgaagaaaaagaggtttaatggactcatagttccatgtgtctggggaggccttataatcatggcagaaggtgaaaggcatgtcttacattagtggcaggcaagggagagaaagaaccaagcaaaaggggtttccctttataataccatcagatctcatgagacttatccactaccacaagaacagaattggggaagctgcccccatgattcagttatctcccaccgggtcccctcccacaacacaagggaattatgggagctacaattcaagatagatttgggtggggacacagccaaaccatatcattctgccccagcctctcccaaatctcatgtcctcacatttcaaaatcaatcatgccttcccaactgttccccagtgttaactcatttcagcattaactgaaaagtccacagtccaaagtctcatctgagacaaggcaagtcccttctgcctatgaggctgtaaaatcaaaagcaagttagttacttcctagatacaatggggttacagatattgggtaaatactgccattccgaatgggagaaattggccaaaacaaaggagccacaggctgcatgcaagtccaaaatccagtggggcagtcaaatcttaagactccaaatgatctctgttgactccacatctcacatccaggtcacgctgatgcaagaagtaggtccccatggtcttgggcagcctggcccctgtggctttgcagggtacagcctccttccctgctgcttttaggggctgatgttgagtgtctgtggcttttccaggcacatagtgcaagctgttggtggatctaccattctggggtttggaggacagtggtcctcttctcacagctctgctaggcagtgacccagtagcgactctgagtaggggcttcaatcccacatttcccttctgcattgccctagcaggggttctccatgagggccctgcccctgcagcaagcttctgcctggacatccagttccatacatcccccaaaatctaggaggaagtttccaaacctcagttcttgacttctgaacacctgtaggttcaacaccatgtggaagctgccaaggctggaggcttgcaccctctgaagctttggcctaagctgtacctcggccccttttagccatggatagagcagctgggacagctgggacaaagggcaccaagtccctaggccgcacacagcaggggggccctgggcccagcccacgaaaccactttttcctcctaggcctccaggccattgatgggaagggctgctgcaaaggtctctgacgtgccctggagacgtttttctccattgtcttgctgactaacatttggctcctcattacttatgcaaatttctgcagccagcatgaatttctcctcagaaaatgggcttttcttttctattgcatcattgggctgtgaatttcccgaacttttatgctctgtttcccttttaaaactgaatgtttttaatccccccaagtcatttcttgagtgctttgccactttgaaatttcttctgctagataccctaaatcatccccctcaaattcaaagttccacaaatctctagggcatgggcaaaatgctgccagtttctttgctaaaacatagcaagagtcaccttttctccagttcccaaaaagttcctcgcctccttctgagaccacatcagcctggatttcattgtttatatcattatcaacattttggtcaaagccattcaacaagtcactagggagttccaaactttcccacattttcctgtcttcttctgagccctccaaactattccaacttctgcctgttacccagttccaaagtcgcttccacattttcagctatcttttcagcagcaccccactctcctggtaccaatttactgtattagtctctgtttatgctgctgataaagacatatccgagactggttaatttataaagaaaaaaaggtttaatggactcacaattccacgtggctggggaggcctcacaatcatggcagaaggtgaaaggcacctcttatattggcggcaggcaagagagagaattagaaccaagcagaagcgtttttttccctttataaaaccatcagatgttgtgagacttatccactaccacaagaacagtatgggggaaactgctcccatgattcaattatctcctgccaggtcccgtcccgcaacacatagggattatgggagctacaattcaagatgagatttgggtgaggacacagccaaaccatatcacattcccaccaacagtgcacagaggttcccttttctccatgtcctcaatgacacttgttattttatgtctttctggtaatagccattctaacaggtgtgacattgtttttcactgtagttttgatttgcatttctctgatgattagtaatgttgagcaccttttcatacacctgttcaccatttgtttgtcttctttggaaatatgtctattcaggtgttttgcctgttaaaaaagtcagattacttgtttttttggtatcaaattatataggttccttatgtattttgaatattaaccctttatcagatatatcatttgcaaatattttctcccattttataggttgaattttttattgtattgattgttttgctgtgcagtcattagttatttactggacctgttacagcaaaagctgggttcttgaattttacatgttttctttatcgactctttaaagaaacttggaatatagaaaagttccatattcagtgtcccttgccattccttttgtcactcttctacctgcctcatactgtcttccatcttcccccacccaaatgtgttgtaggaaaaggatctgattgtagtaatttactttcctactgtcattcactcattcatttagagattttactatctgcttaccatgtgccagtcactcttgctgggtatacattagtgagaaaaactgtcaaaggccctgacctcacgaattgaaattctaggtgggaagacattcattcattcagtcagtcttcaaaaaacgatttatggggtacctagtatgtgccagatgctgttctagctggtaaggaatacagtggtgatagaataggagaagttagatggtaataaatgctatgaagccaaagataagagaatatggaggtagaggaacagacggtaaacaaatacagacaaaactgcactactgtgtcaggcagtgataagagcagtgaaggaaaatcaaggagagaaaaggggaagagactgaggggtagtgttattttagagagggtggtcagagaggtctttctgtagaagtgatatttgaccaaagaccttgaatgaactgagaggtcacctagtttgaatttagatcagtgtaatccagactttactaaataggtggatgaggtattttacagaacagaggtcgggctggttagtgcctgtggtgcaaacacaggctgaatcaatgcggcactgcccttttgtttggtaacaaggcctttttttgggaaagtacccatagactactaactgcttttgttgatgtaatagacaagtagcttcacaaaacaatgaaagggatagatgaagtccttttggaattttggtttatcctttaaatgttattatgacttaaagatgtgaaaaatatgtttcactttagttttttctgataataattttcaggaaaaagaaagctacacctagagaactgataagtaccattcagaccaggaaaggtactatcatttaaatggtgttgtaaagatactgtttgtgtgcttttgatcatggatgctgatgattacagcatggtggtgtcctcattcccatcctacccatggaattttggttttcatatttaaccagtttagtttcactagtgatgaatttgtctggtacctctgttggatcagtgtcttagccaggccttgaaggcaaatgtgctagagcaggaaagtggtcctggatacctagaaattccaacaatttctcatttgaaggatttctttgctgttattccaccatctgccttttgataatgcttttgtattgaatttttatcatattttattcatagatgaattcagtgatatagcagtatgttttaaaagtttttcatgtcaaaaactgaaggtaacttgagaatactaagtctctgttgtgatgttagggcaccatatgtacattagacttatgaatattccctgatggtatttgaaagtctaggttgcagagttagaactatgtagttagcatccaggttttacattctatttaccaaaaataatttaaaaacctagattaggtgtccttgtttaattacgtaaatcatcagatcataaataagggagccttctattgatacaaagtgtgcagctatagaacataccaagagaaccataatgaggcagcttcatctataaggcatagccaaatctggatgtccaactggttgaatgtgaatagaatataattttattgtgctcttttatctccttgcgctgtagctgtacattatcagcttgtgaatgaaccttatctgttcctcaattgaattttacattatctctgttgctttgcttcttaccttttcagcacttcactggatatttatcttaacaactttagaggttcattttagaattcaacatttaacaggtcatggatgtcaaagcaattctaattttaaagagcccttggtgttcagacgattaatatatttttgtctctgtgactggaagttctaatcctaaatatccacaggagaaatgagcaatgaaactgcttctcggaggaacttacaggaataaaaaatggacattacttagccctagtattgttttgagttatatgaaatatcataaagtggttgatttgcaaaactgaaataattttaaaatgtatatatgattaatcacctttagggaaatagtgtaggtattgatgagaagggagagtgaacaataataaaataaaaacaacaaaatggaatgattttttaaaaactggaaaattatttaaaagaaaactgttcttccattttagttgaactaaaaccttgattttcttttttttttttaatttacctacaattgatttttatctgcctataaagagttttgtggtcaaattctgccacataagaatacctctacaaatagaatatatttgagtatatttcttttgaattgggaaaagcaacacaggtatacaattgattttatgtactgaattatatttattcatatcattatacaggaaagaaacttcattgatagggctttgatttcataggattgatattgtagtgactgaaaaaatttagaaaataacaaattagtaataagtgaaattataggggaaaaggaaaacttttttttttaaagcttactaatgtttagatgctaaaccagatatctgagacagcactatgactcttcttaacatgagtgacatgtgacataattgctaccaacacatcccttcctctttcggtttgtgagggttgctgctagattgcatctgagatgtcacagtgtatgtacacacacacacacacacacacacacccgacacacaccgcacacatatacacaccagcttctttctgagagagttaccaattaacatgtgttgacatatctttatccttcccaggaggaaagtggcaggagcttgtgaaaagttacaggctatgatttaaactatgttgtaattggaccaaataaaataatttctggcttataattattaattttttgctataaactctatcaccaggaataacaggtcttaacatttttagcatattttcctgcagtattttttttgtgtgggtgttttttaatgtgtttgagcttgaactttatgactttataccttttaaaatgaactttataggatgatcatttcccaggttattaacagttctttataaatataattcgtattggctgaaatcatacagatcatgtggcttaagtttttccttattgttggacaactaagacatttgaaaatgattgttgctgttataaataatggaataatgttttatattaaaaatttcttgtgttttagatacctccttaggatggagagatatctatagaactaaaattagttaatgtaagttaagagatttaaggtttttaacatatttttaaattacttttcataaagacagtaagaagctattattgatattttagaaataaggaatttgaggtctggaaaagttaaattactcgtccagggtcacatagctgctaagtgctagggaccactggggaattggaaccccagtccttttccactgtaagtgtttcaagtgtgttccttggaatattagtagatagggcaaggaaaaaagggcttatgagaaaaaatttggaaatgtcaagttaaagctttttaaaaaaatcctcaggccaggcacggtggctcatgcctgtaatcccagcactttgggaggccgaggcgggcggatcacgaggtcaggagatggagaccatcctggctaacacggtgaaaccccatctctactaaaaaatacaaaaaattagctgggcctggtggcaggcacctgtagtcccagctaatcgggaggctgaggcaggagaatggcatgaacccaggatgcagagtttgcagtgagccaagatcacaccactgcactccagcctgggtgacagagtgagactccatctcaaaaaaaaaatcctcttatctctggacatcaccataaagacaaaatgatatgtggccgtagaaccctgaggaatactctgggatgtgcttgctgatgccgggctacattatggtgatgaaagcagacttttgatgagaagttgaggttcatattctactggccccatacagaaactctttaattcaggacccataaacatctaacattaatccctttaggtaagattaaatgaccaaagaggaatggtttagtgacataattaaaatcttactaaattcagccccttgagattttagatagaaaagtaacacaaattgagctaataacaataatttaaaaattatcttttaaaaacggtttatttatttgagacgaagttgcactcttgttgcccaggctggagtgcagtggtgcaatctcggctcactgcaacctctgcctctcagttcaagcgattctcctgcctcagcctcccaagtagctgggattacatgtgtgcaccaccacgcccagctactatttttgtatttttagtagagacagggtttcaccgtgttggccaggtttgtctcgaactcctgacctcaggtgatctgcccacctcggcctcccaaagtgctgggattacaggcgtgagctactgcgcctggcctaaaaactatttatttttaaatacttatagagtcacaggaagttgcaaaaacatgtacagggaggtcccatgtaatcttcaccgccaagggtaactcttacataaccatactacagtacaatgtcaaaactaggaaattggcatcagtaaagtccacagaatttatttgggctttaccaattctatgtgcattcaagtgcacatgtgtgtgtgtagttctatgtaatttcatcacttgtagactcatgtaactaccaccatactcaagatgctgaactgctcaatctctccaagactccctctcgccagcactttgtagccatgcctacccatctcctgtcaataaaaactagttttttaaaaaaatgagcagtgtatatcttaggatatgatagttccaaccctacttcatatcactcatttatttctataggactctgctcataactgattaaggttcaaatattgtttcgtagatagtatttactaggacagtaaagttagccagtccagtttagaaagaattttaacaccaaagaaggctggccttaattctgagtttaggagggaccttaagcaaaatggaaaggtgcctgtgtgctccagtgccgtttcccatggccctctgctgccttactgcactgcctagcctttgcgcatcgctttggatacctcaaatgccctggggctgataggatgacagtcagctcccactcttagctttcacatggccctcaccactgtgggtgagcctccagggtccattttcaacccacataatctgccatacctattctgctatacctgtcatatccctagttgattgtgtctagtctcccttttgtgtctagactccttggacaggagtcctcttgacttcttcctcagccctgtcttgtacttctcttgtaggctaatctcttaaatagaagaagtaggacagacaccttgtttcccacacctggaggtggtcacaggatggtagggcactgcaccttgcatctatttgttcaggaccttgcagtcccaaatttcctaacctttaataaagtaatctgagctaacgtgttaaagagtttaatgtgctatcccttgcagaaatgactgtagttcaaataaagaattcctagtgaagtaaaagccttaactcaaaggaaatcagagtgaaactcacagagttatatatctgcctgatgactcttggaagtaatattttccagacgtgtgccttctaacctaaccctaatcctaatgcacctatcggggatggaccatttcccaagcattttggccaactgagaattttctatacatggttttgaaattgtaagaacctcaatttacccagagttctgaaaacctgctgagatcttggagttgattggaatgtgctctgttttggaacacaagattaatttgtggatttgcagcaataaacaaatggctgaaagccaaacagtgtagctattttcagtgagtcttcagtaatccagcatcatagagaagttaatttcatacaagtttatcccaattaatcctctaaacttgccattatttagtaactctggtagaatatttaatgtgactgcttttctaaagcatactgagtatcatttttcttttatttgatgattaaggctcagtatattgaacataaattagcatcctgtgtacttctgtgatttatgattttgaagtatgtggattatctgttttaataccagatgcccccagtgctgtttttaaagttctgtttgcttttgttttatttgtctcttccctactactgagaagctgtcactccttgcttgccctttaggtttccatcctatcttcttcccttgcacaaacataatatattgcttttaatcctttggatttcgaatccaggtaactaaatttattggagctgtatgtataatacaagtgcatgtatttgccttctgggtatttctcctctgaattaagtgtatgaatgtcagagtttttggtatttggggccttgattttggtttcacaaatcctttgtaaacttgcttgctacatgatctcactccagtgattgttttaataactgagatttccatataaatatcctctgaatagttgaggcattactgtaatgagattaattcttgcatttaacaaatatttattgagtgccaaagaaacaccttctaggtgcttagagtttataattgaacaaaacaaaagactcttgctctcatggagcttacattctaacaaaggaaatagataataaaccataaacataataaataaattatatcttatgtttgaaggcagtatgtattatggaagaaaaaaccccaaaaaacaaatagagcccagtaaaaaatcaggagtgccagtgggtgaagactgtaatattaaatagggtgggcagaatagggttcactgggaaagtgatttgagcaaagaggcagaggagtttaaccaagcatatgtttaggataagaattcctggcaatgggaacaaccagtgcaaaggctcaggtgtgggtgcgtgtgtaggttgtttgagggatggtaaggatgttgtggccagggtgaagtgaacaagggaaagggtaggagaggaagtgagacagagaatgagggcagatcacataggaacttgacagctgttataaagatcttgggttttactctgagtgaaataggagccatgaaagtttttgaacagaggaatgatataatctggcttacattttcaaaagatcactatgactgcaacgttgaaaagatgctgggggaagggggacaatggtggaagaagggagagctataaggaagctatttcagtaatctaggtgaaagctgatggtggcttggatcaggggaacagcagtgaagataatgagaagcagtaggatacattttggaggtagaaccaataggacatgcttatgaattgaatgtggaagtgtatgggaaagaagagtcaaggataattctaagcattttgggctgggtcatttggaggactgtgggtcatctgttatgacgcggaaggctgtagataagagggggagttcaattttggacatgttgagtttgagatacctattagacattcaattctagatgttaagtgtgaaattggatatatgcttctggagtttgggagagaggtctgagctggagatatacatttggggatcattaatacatagatgacacttaaagccatgagatgggagaataccaaaaaagtgagcattgaaagagaggagttcagaaggaaagagagtaactagcaaaagaagctgcatgggattgaccaatgaagcaggaagaagataaagggaatgtcaaccgtgttttgaaaggcaagtaaagatgttttcaaatattcagacagattgtgtcatgttgacaaaacatcaggaagaagaaagaccaaaatctggggttgcatttgaagttttatttcttacaggtgatatggctagtaggtctatttttccagtgtggttggcagttgggctgattgcagactctgtggcaggtcttcaaatggtattgtgaagaagctggcagtactaaaaacaaaaataaaagattttgcatacaaagtgcagggcaaatgcatagcctgtgacctaggttagagtgagatcattcaatgagaatgcaggtaagtgggaaagtaaaggaagatgaaaaatcaaggcatggaggtgcagagggcaagggggaggatgacatggatgcaattatgaaattagggtgttatttctccataacagatgggaaaagaacagagagtcaacatcactgtgataaatactgaacagcaaggaagcaaatgatcacagctgaggcatgcgagccgctgtgaaactcagaagtgatattatcaataaagccagagttgtcaagtgattaccaaataaacaacatatggttcattggttgccatgtccctggaaacatatcctcttaggagatggtatgcctctgtaaatgagtttctggtttgtgcatacttgcttttggtacatatggcagttgtgacattgtaactacccagtttaccaataagcaaaactgctgccaaaaagacaactatagatttctcattctggataagatggagtggattcaattcttcctattcctcctactaagtacaattctaaaccctggacgttatatataaacaaacaaagaaagactctaaaaggcagagagaaaaggcagactggcttgggccctctctatctgaaggacacagtggtgaattccttgaattttctcttttcctcatgtatcccaggctggatattgacagctacccagaaacaccaatgggcacagacaaaaaaatgccccaagaaaagcttactctttgtagccataaaacaaggaaaatagaatcccagagaaatagaaaactttcagataactgctctactatgcaaacaccacagaagaaaccacaggcttacctccacccccatcagcaaagaccaaatgaggagcctaatcatccatccttggttggttgtgatgaagcagctctttactcctagattttaaaggcatcatcataaaaatactccactgagcaattatgaacacagagcatatgaaaaaacagaatgtttaagcaaagaatagaaagccttagcaaagaaatacaagaaataaagaagaaagaagtggaaattttagaactgaaaaatacaacaactgaaatttaaaagtgaatggaggctgggcgtggtggctcacgcctgtaatcccagcactttgggaggccgaggtgggtggatcacaaggtcaggagatcgagaccatcctggctaacatggtgaaaccctgtctctactcaaaatacaaaaaattagccaggcatggtggcgggtgcctgtagtcccagctacttgggaggctgaggcaggagaatggcatgaacccgggaggcggagcttgcagtgagctgagatcacgccactgcactccagcctgggcgacagagcgagactccatctcaaaaaaaaaaaaaaaagtgaatggatggtttgacaacagaatggagaagatagaggaaagaaatagtgaacttgaagatcgaacaatataagttacccaatttgaacaacagagagaagatggactgaataaaaaataacagtggtaagatctaacattcattatctttggaatcctagaaggagaaaatcctaaatatgaaaacttaaagaaatccacaccaagacacataaccaaactactgaaaactaaacataaagaaaacatacttaaaagcagcaagagagaaaggacaccttacctataggggaaaaacaatgagaatgacaggggctcttctcatcagaatccatggagcccagaatgaagtggaacatttttctttctttttttttttttaatttttttttcttttttttttgttttagacggagtttcactcttgttgcccaggctggagtgcaatggcatgatctcagctcactgcaacctctgctccctgggttcaagcgattctcctggctcagcctcctgagtagctgggattacaggtgcccaccaccacgcctggctaattttgtatttttagtacagacaaggtttctccatgttggttaggaaaatgtttgtttgagacggagtctcaactcctgacctcaggtgatctgcccacctcagcctcccaatgtgctgggattacaggcgtgagccaccgtgcccggcctgaagtggaacatttttcaaatgtgggaaaaaaaagaattgtcaacccagaattctatacccagtgaaaatatccttcaggaatgaagggggaaccaagctgtctccagatgaagaaaaactaagaggagttgtgactagtagtcctagccaagaagaattactaaaagaagttcctgaaacagaaaggaaatgagaaaagaaggaatcttggaatatcagggagaaagaaggaacatggaaagagtaaatatatgaagcacaggagaaaggagattgaattaaagttgcataacttgcaaaacagaaatgtacaaggagatcagtgggtgctagaatgggtaactctcaatgcaagtgccctcctgtttccactatccttaaaaaaacatgctgctttcggcctggcatggtggctcatgcctgtaatcccagcactttgggaggccgaggtaggtggatcacgaggtcaggagttcaagaccagcctggccaacatggtaaaacccgtccctaaattaaagtacaaaaattagccaagggtggtaacgagcacctgtaatccaagctactcgggaggctgaggcaggagaattgcttgaacccaagaggcggaggttgcagtgagccaagatcgtgccatggcactccagccatgagtgagactccgtctcaaacaaacaaacaaacaaaaaacaaacatgctgctttcttctatgcaccagaattccatattttaaaagcccctcaataatattcttaaattacccacttggtatacaagaacgatgttagttggtgagcatgtacagctccttctgcttcctgacttctatccagcattcctccctctccagtaatccagccaccccacatgcaagatctcttcctgagatatagactgccccaccctggcctccactgtttcttttgccagactgcgaggagaatcacatatttatcactgagatctatgctctttatggagtcccaaaagtggttggaaaaaatttctttgatcaagggcatcacttatactcagtctttattctcactctgcctcttcacctgataattattaattttttggaaccccaaaggctgagcttgtctataagaggccttctgtctgggattggggctgcatttgtccccagttagaggcaggggacagaagaagaggtggccaacagtggacacacctggctgttgagcaacaacttttatctccctggcttcagacttcctatatcccagccttgtatttggacaatgttgctgcctaacacaaggtcatagataggaatcacgtggtgtaacctggggagtgaacatctttgcatttacatggacctgctatcttagctgatatacacatagggaagtggcgagtggggccattgataaaacactgattgtggacttgcaaggcctctgctctgagtgactgtgggatacacaatgagataataataaacctgtgtgaccatgaaggccagtgtgctgttatgagaattgagtggtgaatgttagtgatgccttctagttattaaagaaggaaaggcttatttaacttattttttgaaactaaggtctccaagatgagagcctggtatgattgagtggatggcacagtaaatctttttctaacttgatgagccagtctgttgaagaaactctggcagaatatgaagctctcaaatcccagaacctactttcctctgatgccttcctcaatctaagtacaccctcttcttcaccatcattttatcatacagccactttccttgtcttgagtcatacaggaataaggaaataacattcaaaagaatttttataaagcctttgtgtgttgcctatttgtcatatattgaacaatgtgctacatgtgaccctgatgccggggctcagtccttagaaggggacagtccttgccattatagaaattacctggaacacggacactgaacagaggggtgtttaatgtaattttcatatgtgctatgagaaatcagatcagactttgagaacatacacaggggagatcagatcagatttccccagaggaggtggcatgaaagcaataaacaggagtaggtgagagaacatcagagggtcttatgtacacagtaccttttgattatcatctcattcagatgatttatttcctggtttcaagaagccccccatgtagccaggaacatgtacatgaattgtgaattaatcatttcgactcagtgatatatggattaggaaaaaatgacctgcagatttctctggctagatagtacaggcaaacttttgaaggaatttgttataaataatgttgacttttccagtttaatgcaatgaaaatattatctagtttgtccatttttgaaatatttgtatgttgatgtatgttacaaaattgtaaatgtatacatattcatatttcctttttttggtattttctgattatgctaagaaagggactctgtatgcaaatcaaaggaaatactacttaacctataaaaagtaatactatcggccagacaccatggctcacacctgtaatcacaacactgtgggagaccgagatgggaggatcactcgaacccaggagtttggaaccaacttgggcaaacacagggagactcttgtctctacaaaaataaaaaaaaattagccaagcatggtggtgcatgcctgtggtcccagctactcaggagactgaagtggcaggatcgcttgagctcaggagattgaggttgcattgaaccatgatcacgcactgcgctccagcctgggtgacaaaacgagaccctgtctcaaaaaaaaaaaaagaaagaaagtagtactgtcatttcatgattcaagtctttcttgttcaccattaaacatgccttatctccttacatgattcttacacaaagtaggtgccaggtaaaattttatttgctgtttgaattgacatggaacttgcagaggtaccatcccaaaatcctggagtcctaccataggtgagtgcatttcctgcttttattttgtttgacttttcaatggaaatgtagtcgaaggagtgtaggtgagatgggctcggcaggatgtgggtggaagatgtgatctcacttgtcccaataaaagggtagcagtgagtccagatcccctgagatacagctgggactcttcagtttggatgcccgtggagagaatcttaattaaagagcatccatgcctgaactctggaaggcaatgacttgccccttttgtgggaactactttgagagccatacccttatgacgtgtctacacagtatctaaggtgcctgccttcttggtgatggagattgacaaaagactttttgtctgtccagagtgcttttcagttttatgggagaagcactgggcaatttggtcagccttatcagagttggagccagcactgaacatgggcctgagaatttgccctgggaaggtgaatttctatgggaccatgtattagtttcctacaactgccaaaacaaagtaccacaaactgggtggcttaaagaataggaatgtattgtctaacagttctggaggctagaaatctgaaatgaaggcgttgtcaggacagtgtttcttctggagactttagagaagaagacttccttgcctcttcctagcctctgatggttgcttggcattccctggcttgtagatgcatcactccaattgctgcctccatcataacatggttgtcttgcctccgtgtctgtttctgtgtgtcctctccttttctcagaaggacactggtcatattggatttagggagaaccctagttctatatgacctcttcttaacgaattacatctgcaaagaccctctttccaaataaggttacattctgagttccaggtggcatgactttggagggtaggggtgacactgttcaacccagtacagacaataacaggaaaactcagaaaagaatctacctgttccattttcctaaactattttgaagacctgtgtctaatattccatgaacccaacttctgcttcatctatcccaagagagaaagagccaggatggtctttttacttgtccctagtgtcttgccatctctcacacacagaggatccagatcaacatggtcctggggatgctggtgtctgagatcatgactatgcctgtgctgagtatgtactgtgggatgctgaagttttatgtgtatgtaagcctggatccagccatggccaacgatttcctcatattttcctatgaccttaggaacatcagatatgggtacatccagcaaaaccaaccagagaacatggagatactcatctctaccgctggtgctgggttcccctctcatcggtctggctgccactgttgggaggtggaagtgggaggcccagctgaacgggctctgggtgtgtgcagagaatctgcatattgcaaagggactttccctgtatctttagactttgggttctggattgtgggctcaggggaggacatgaagtagctgtcacttctgaaccctgggctgttctctgtgtgaagcccaatttgcagaaggtggggtttttcctggactgtggtgttgaaagccattttatgtttcagtgtcacatgtgaattagagttcttgtcccttaaaaatgggcttatcatacctaattaaacaagatatcttgcagatttatgatatcttatttttttttaagttcagttgaggcactgaatttttacttttatttatgtatttatcaaacagctttattgaggtagaccatgatacaataaagtacacatatctagattataaaattatacattataaattatataatttggggccgggcacggtggctcacacctgtaatgctggcattttgggaggccaagacgggcacatcccttgaggccgggagttcgagaccagcctagccaatacagcgaaaccccgtctctactaaaaatactaaaattagccgggcatgctggcacgcgcccatagtcccagctactcgggaggctgaggcatgagaattgcttgaaccccagaggtggaggttgcagggagtcactgtactccagcctgggtgatggagtgagactctgtctcaaaaaaaaaaattacacaatttggtacattttgacttatgtgtacacttgtgaagccatcaccacaatcgagatagcacacatacccatcacccctaagtcccctggggcctcgttatgttccctgcctccagcccctcccgtcgcctttcttcatcaacaccaacagtggatgtgcttttgttgctatagattagcttgcattttctagagtttattataaatggaatcgtttaatagatactcttttctgtaattgttttgagatctattgatgttgttgaatgtatcaacaactcataacttttcatttctgagtagtattccattgcgtgcatatacacaattcatttatccaagacgattctgaaactgtgtgcaaggaaagctacaagcaattgcagcattttcttgtatggttttgtttttgattgtctcacttctagtcaagttggctgttttcagctcaacaaattctgagaactttcttttaaaatgtgcctaattggctttttgatgtgttgtaaaagtcatagttttttatatacggtcataggtcatccaagatacaataaggtttgggttgtgaagataaactctctattttaaataaacatataaacaaagataaacactctatttttttttttttttttgagacggagttttgctcttgttgcccaggctggagtgcaatggcacgatcttggctcaccacaacctctgcctcctgggttcaggcgattctcctgcctcagcttcccgagtagctgggattacaggcatgcgccaccatgcccggctagtttttgtatttttagtatagacagggtttctccatgttggtcaggctggtctcgaactcctgacctcaaatgatccacctgcctcggcctcccaaagtgctgggattacaggcatgaggcactgagcccggcctaaatactctgttttaaaaaaacatataaacatatgcatggacagttgaatctatgaggaaaatgagattgtgctgagattgaacatagcccactaaagaaaaataacctaaagatggaagcctaggaaataattttttctttctgctttcttggaaaacaaagacaccaagtggttatatttctttttttattttcaaaactttagaaataaggatccatatgctttttagagcctacctttgtgtgtacctccaaataactgtctgtgaaatggccctgccagcatcttctcttgagtttattgtggaaagcttaaaagatgacactaggttccagagtctatagtgattcatggtttttttgtttgtttctgtttttttgagacacagtctccccatgttgcccaggctggagtgcagtggcacaatctcggctgactgcaacctcagcctcccgagtagctgggattacaggcgcctgccaccgtgcccagctcattttttttatttttagtagagacggggtttcgtcatgttggccaggctggtctcgaactcctgacctcaagtgatctgcccgcctcagcctcccagagtgctaggattacaggcatgagccaccgcgcctggcctgattcatgttttgatgcgtgactttttattgactgggacaaaatgtatacactgcttgtgcagacagttcccaatctctaccaggtgaaatcttgagagttattaaagtcaaggagggagctcaaggccattgagaggatgtatggaccagcagacaatcattcatgcaagaaatgtattgccattttaaaatgtgaagaggaaaaatatatctaccaaaaaaccttaattttgcttggttttatgttatagggacattcagtacaacagaaaatgaagctatttatagtcctgtgtttgtaaacaaatatttgatttatcacatttttgaacaattccaataggaagctgcactagtttatgggagccagtagaatttttgcaaccaaaagtaaaaaaaaaaaaaaagaaagaaaaaaaagctgtggattcatcaagaaatcacacttcctggcgtgagtactcaggcggaagagtgccagttgtaggtgccggtgacatcattagcataatcagttctgccaaagacattcttcactgtttctgcaccatggtgctgattctggggattcccatataactccaaagtaccaaagattacagtcccttattgcacattaaaatatctgtggcctactggtttccatgaaaagctcgacattggccaagatggaaaaccaaaagactgctgcatattgttgtgacaaattcttttaaaaactcaagaatgcaaaatctttcatctcaaactatttcagtaaaattgttgcttcaggtagatgtttcctctgcatttcacagctctccgtgtactctcacagagaactgaataccatcatgagacgacgagcatgccacccacagaagcaccaacatggtggtgtggggcaaggacgtgggatcaccatttccctttccttatgtgtgaatgtggagcaaatcatgatatggtggaagggggagaactagacctaggttaagctgtgaaacttcagggaagttgtcttggggtatacgtcttaaggaggttctaaatcattgttagggtaaaaggaattttccttccttgaaggtttgatctctggaataaacttgacagtagacagcagaaaaggcatacacatttattagtgtgtatgcatgggagtcacgaaaagtatgaaactcaaaggaaggccagatggttgaagcttagacaccctcttcataggggagaggcaagtaggggatgtagacaattttagaggaagattaaaagattctgggggaaaggaatgggcctgaagaacagacagtagcctgggacaaagtctgtctgagctctgggtgtgatatccacccctgtcttccttcctggggtatgcatcaatttcccctggttgacaagatatctgggaaagagattcatacagttgaatatcttctggaggatctggcctttaagtagatagggggagttcagggaaagcccttccctgcatttgctgctccccaggtgctctcagtttgaagttcaaagcagcatattttggggtattgctttctgaaccccaacaacaccaacagaaataagatatggagaaaattgagcttatctaggttcccagataaaatatatgatgtccaactgagtttgaatttcagataaatgacaaataattttaaaatataagtatgttccaattattacaatgggacatcttacattaaaaaaactgaaattcatttatctgaaattcaaatataagtgggtgtccaatatttgtatttgcaaaatctggcaaccctaggcttaccagaactcttcacacaaaaatactgtttagggatggagtatcccttgaagggatccaagggtggataaaaaggtgatcatgatgaaccacatatagtctaacacccttctaaagagggtgagactaattaaatgcagggtttttgctgatgtatttggtggtgtatgcatgcatacccacttttgtttgttgacagagtatgctaaactgcttgaggaagtataagaatacctgagagctgccactggctggtccttctcctctggtcagctactctgctaaataaatattgaaccaacagtcagagaatgtttgaagtggaccccgattatctgcctgcctggggcagtcacacatctgtgggtggccctgatcaaaaatatggtggttaagagagcagtcaaatgctctgagttccaggctgggctaccccactgcctatggagatttaggggaagttcccaacaccccaagctcagtttccccatcagcagggtgataatataatacctaccttttaaggctattgtgaggattaaatgggttcatatatgtaaagtgagtacattgatgggccctaatgaaaacacaataaatgccatctgctattttactgttatttcccaaaacatagtgcttgctaggttgtgatatagttgtttacctaatatctttcttattcgaatgtacataccttgaggagagggagtaaatcctgttcacattgcacccacagcatgtattatggtggcatgcaataggcactagatgagtgttaaatggaaagaattgccatctattgtccccatggattaggaaataatcttccctggttggttcctgaacagacacacttacagaactggttctttaggccagaacttcccaactaatatgcggtattggtatacctaagggactgattctgcagcctttggatggcctgagcttcaaaaggtggcttggggacatggatcagtttaccctagtgtgccatgcaaatgtaattttctgtgagtccatcatgacttaaaaaaaggatgggaggcactgttctaggctgtaatgtaatactttcagttgttgcagaatatagcttggcccttgtcttagtctgttcaggttgttataacaaagtacataggctggtcatttataaataataaattatttaaataatttattttaataaattttaacatatttattgtaaacaataaattatttaaaaaataaatttattgcccacagttctggaggctgggaagtccaagctcaaggtgccagcagatttggtcagggcctggtctctgattcataggtggtgccctcttgctgtggaaggggagaacaagcccccttgggcttcttttataagaacggtagtcccactcatgaggactcctcccaaagccctacctcctaataccatcgccttgggggttaggatttcaacatatgaatttgggggcggggatacaaacacttggaccaaagcagtactgtttttttttttaaataaagcgagttttagatttttagctagctagcttgctagaaaaagattgaaaaaatatatagcatattgaggttatttgagagattgtaattgtgatttttcccctaatattttccccgaaatgcatttctgtaattaggaaaagacaaactctcgtaagtgttatttttaaattctttttatttttatttttttggtatgaggtaaaggtctcactatattgcccaggcttgtcacaaactcctgggcacaagcagtcctcccacctcggcttcctgagtagctagtattacagatgtacaccaccgttcctggctttaaaattatttttaatgttatattagaaatgtttatgtgcatctgcaagtaagtaaactctaaacaatgatatgaagtggttatattgtgaacaataaaccagccttcaatgcagctaaataaaagcccacatttgatctttaaagaaaaatgtctgttgctcaaggaaaaataaaaagctttccatccagtagaaagtaataactgttggctgggcatggtggcaacatgtctataatcccaacacttcgggaggctgaggcaggatgatcacttgatcccaaagagtttgagaccagcttgggaaacatggtgaaaccctgtctctacaaaaaatacgaaaattagctgggtgtggtggcatacgcctgtagtctcagctactcgggaggctgaggtgggaggatcacttgagtccaggagatggacactgcagtgagccatgatctggccactgtactccagcctggcaacaaagtaagactctgtctcaaagataatttttgaactcagagaataaaatgaatgtagttaaaacagaataaaatgttattttatgttttttatattattttattatttatattattttattattttatttaattattttattgagatggagtcttgctctgtcatccaggctggagtgcagtggcgcaatcttggctcactgcagcctctgcctcccaggttcaagcaattctcctgcctcagcctcccgagtacctgggattacaggcgcctgccaccaggcctggctaatttttgtattttcagtagaaacggggcttcaccacgttggccaggctggtctcaaactcctggcctcaagtgatccgcctgcctcagcctcccaaagtgctgggattacaggcatgagccaccgcacccagctaaaacattattttaaaatgaaatgagtttgtttaaggaccaatgattcattaaatcctcagtatgtttgttgaacgagtatgtgaataaccaagcgtgtgctttggtaccaggtgctgtgcgtcagatgtggttgctgtgctaaggctgctcacagtctgggggaagacagaagtttatttccttatcaaacttttgtgctctttatttacttgtcctagttatgttctaaacccagggttgctaacagtgaatcacaagcacgtgctttctgaatctgcttagcacacaggtcttccaggagatgtcagtaatcactctttgatccctttctttgattaaaactcattaggtccacttccatgtgaatgactggattattctctttcattaactaatcttggcccacccagaaatgcagtgccactttttgtacatttacattggtttttaaagatgattcctgttggctgggcattttccttcttacacaagttcataagtatctgaaaaatccagatcttttactggataatatgatttattattaataatagaaggagttagtgttgtaaacaaataatcatgccacatgtgtaacaaactataattatgaacacatttaaagagtttactattacaatcaaatacagccacaataaaaatgatctggcatcttttatgatttacatattcgttcttggacagcactgtaattagggacaaatggttcatatgatgttctaataaatgactataattagtgctactttcatgcagtaaagtcacatttttcgttttgctgctaacatgtaccctttcatcatcatcttcacacacccactagcatttgcagatgagaaaagacaaaggtctggaatcttactcatccatggctctctggagaaaccttgtcctcctccctcttctcagacttgagagcctctatctcctactccagacttccctccccaccccacactgcctccctgccccacactgccccccccgcggaccatcctacccaacagcctaaaccttttcaatcagaatttcatcctgctctgacccactgacttggagctggagaaaaaaggcaacagaagctctaaagccaaaaaacaaaacaaaacaaaacaaaacaaatgtgatcacctgatatcctggggaaggaaagaaactgatcacataatcgtcatatagtgagtgaggggagggggctgcaaatggtatgaattggctctgaatccctggtatctaggagaggatctgcagagaagtggaagaagaaggattatttctaagtaaggtgcatacataatttattgtccaaaccagaatactttcgagagtgaatgggggcactattattaatttcaccaggactacaggtataagccatgaccatctccagaaaaaagacttactgttgcgctacttctaagtagacattggagagagaagagagtaatgatattatcacacctaaatgaggatgtggattctgcatgttattgtgaaaagcatgacatatggagccctaaaagctctgtcctaattactttccataccttttgcccctttcttcttcagttcattccctgctagaagactaatttttgaaaatgatggctctgattttttctgattttctgatttttaaatatctctggtggccttcccatggttagcagaataaagtctgtgcctgactggctggcattcaaatgctgccccaattgggtcccaatcttgtttctcagaaccactagaactccaaaccattggaactactggctgttcctggcctgtcatttcctacccccatgcctttactcaagctttattattttgctgtctggaaacattttaacctctgtttgtacttttgcaatttctgtccattctccatgacctagttaaaatatcagctaaaatggtgtggaaagctgagcattggaagaaaggggctctctatgaagccttctctactcactcttatctcatatagctctgaacttctaggagtttttctacagacctctgtgtatcttttatagacccatatgactgcttttatccttgcattgccatcatgtagatatatgtcttagatcccctaatagatcagaagctgttttagggcagattcaaggtctggttcttccttgtaattctcaaataacttttcattgtgcttgtacatgctagacatgtaccagtattgttgaatgaaagaaattagagactgcaattcaaaattctgatgctgtttatctctgctttggtgaagaaaaactgtgggatgaagatgcttcctgttttgcttgctcagagacttgggactgggataagtgtgggcattcgattcctgttggttctgaggcgtggcttcctttccttcataggagggatagaaaagatggaccagcttttggcatttaagaagcctgttataatctcccaggccagagctatatctttggcatgggtgggtagttacagtatcctattgctaaatggaccatacatgactataacaagactcctttctgcaaccagctttggccatttgctggccctttgggagccccgtctctaggtttcttattgcccaggtagtcacaattcctggcagttataattaaatgcaatcattcaaaccttgcctgaaattatacatatggttagctttctttttattaaatcagtattctatacactagcctacctggcctgatctattaattctgatctctatgaaaactgaaatgactaacactaaaaagaaagactgtcaaattgaatcttcatccctaactaatcataatccctgccatatgtccttggcacaaatcatgctgcctggggcttttcattctatgcagtgaggcatattggaaatttgtgatggtgaggactgctcttgccattttccacactgaagggtgtaccggaagctgtttccaaaaagaatgaaattcaaggcatctggctttttttggcatttgtagttttggaactatgaaaatgaggtatattagactcagtgggtatgacaaaaggtcaaacttttgtctaacaaaagtttataaaaaattatagatattttttctactagctacctcagatttatttaagtctattcactctttaagactgagggttgttggggggaaagcctaagcactgtgaaaggaaagggatttgactatatcctaaggtgccttaaatcatcttcggtttactaatactctttagctataggaccctattactactatataatctttagtttataagtcagagccatgaagagtactttattctagccagaatcctaagtgtattttgacttagcaatagatctggaaggttcatatacgttttgactaagatattcatattcttagcagccaagtacttacagatttacactttgacatgtcatcctgatttatttttatttattggtttaatatgtaactcctcttagaacatagatttttctaaatctggatagaatctcagaaaattgagtcccacatcactctattggatatgagaaagtcaaggctcagggaggttaagcaacttgttcagggtggtaggcttgatagtggtagtgctaaacacaagacaaatagtatcacttccatcactttctggtggtcacagggccagcctagattaacaaggaggggaaataaatcccacctcttaatggagatgatgacaaagcatttgtggccatctttaatctaccatacttagaatgcttaaattttactttataatattttagacttttgggcgtatttactgcctttttaactggaaaattttcatccattatttctttaaatttttttcccctccattttgtctctcttcttcttctgggactttcatcatatgtggattaaactctcagtattgtctccgaggctattgagtctctaattgttattactgtttttaatccttttcttttctctgtgctttacttcagataatttctattgcctgccttgaggttcagttatccttttttttctgcagtgcccaatctactattaagtccatacagtgaatttttttcatattttgtatttttaagttttagaatttccatttgctttttaaaaatatatttacttcactactgatattccctatctgttcatgcattatgataatcttttcaatctttaaacatatttattatagttgttttaaagttctggtttgctatttcaacatttctgtaatctctgactctgtttttactgattatttttctgattatgggtcacatcttcctatttctttgcatctatagtaatttatatttgtatgctagatactgtggatgctatgctattgagagtctggattgtgtttctttttttaaaaaagatcagcttccattttcctaggcagttaatgtcctggccaatcagcttgattctgtttggcttatttttaagctttattagaataggtctagctcttgggctacagtagcatttttggagactcagctgaatgtccagggtgatccaggcagcctccctctctgcctgtgttccagaaagtgtttctaggcaaaataacaaataaaaaaggtataaacagtatatttattctttcaacaatgtttattgggtatctactataatccagacattgttctcggtactggagatacaatagttatttaaaaaaaaaaccctgcttttatggagcttatgttctagtggagacaataatcaaaataaatcagcctgtgtactctgactggttagaagtgctgtatctctcagcactgtgtgacctctggaatgtccactcagatcacactgtctaggacctattgtctgccacatctctccatgagtattggtctacacatgtgcagctaataacttaagaagaccccccccatgctaaactttagatctctttctatgaacaactttccctctgactcacgtcactgcacattccagctacttcagcatccctgaattctgattgctgcctccccagccccgtgagactgccatgctctgtttgagttctccctctctgcctgtgttccagaaagtgtttccaggcaaaatatcaaggcgattgtgtagacagatcttttttgtgtgtttcccttcttcctgggatcacactactgtgtatttattgtccagtgtctgaaagcagtcacttcctatattttattcaattttataattgttttctgtgggtgaaggaggttagttttctgccagttactccattacagccagaagtggaagttctttcccttttatagtgatataatataattttctaataaataaaaatttcttatattaaaaatcacaattctacatagtgcttaggtgaccagtctaaagcatcagatgtagatattatcttgttagtgaagtaaagacacctgtaggactttctttgactgttggctagtatgcgtggttcaataacaggttagtgagctgatgaaattagttctagtttaaaatccttggctcctgggtcaaagtgatgcctaccttgatttgctaacttctttgttctgttctgtcttgggttctttcccggaagccccagaatgcctctgttatttttgcctcctgcatgagttctagttccttatggggactgaacatctaaacttttataatctgattactaatctagagacctgtcttctccaatgtatctacatacccacttttctatttctgtctgttaattatcaattaagctaaaattaagcacccccctccccatttaaatatacttatatccaagtattgtggggcaggagagattagtgaccaaaggagtggcctgattatctctgcacaggaataataaaccttgtagttgctggtgtgaaaatggtttagaaccattttcaatttgggcctagtttaagggatttctttgagtgcatctctctaaaaaggaatggtgcctgtcctcctgattctgggatacagctttagaactgtattattttcatttattatatggtttataccttcagaagagacttagtacataaatagtgtaataccacatttttgaatatttaggtttacttaatcacttaggaaaattagcataggctcacaggagaaaaagtgaaagggatctcacaggaagtcctggtgtataaataagctgttattcatttaaaaaaatcactaccaatattcattaaaaaatgaataattgcttatttattttattgagaacactggtattctgaggagttattattactgttttggtaagtatggtagagaacatcaaaaattttcttaacaaaaaagtaatttaattttctctgaagtgccgttaacttttcatgattatacattctcatgtacaaataaaaaagatacaaaagtatatttatttcagcaatgtttattgggtatctactatattcccaacattgttctcggtactggagatacaattgtttttaaaaaagaatccctgcttttatggagcttacgttctagtggagacaatagccaaaataaatcaatcaataaattattaccataaatattatgttagaagctgttacgtgcttggaataaagcaatgcagggtaagggtgctgttgagaggactgtggttttaaatgggacaggagggtagacttcattaggaaggagagttttgctctgccttacagtaggcaagggcatgagctgggcagatatctggggaaatagtatccctggcagaaggaatagttgttgcaagggcttgaaggtggggcagaggccatcaaggtgcagccaagacacgagtgtgtttggagaagtgggagtaagaggaggatagtaggagacgaggttccaagggaaatgggtgactgaggtgggacatgggggccaggtgatgtggaaactttggtttttactctgagctaaacagggagccactggagagttttgagcaggacatgctgtgaacctgcttaaatattaaaagtatcactctggatcctccaaggataataaatagactccaagagggcaagggtggaagcagggattgctgctaggagatcagtgccatagtctggggaagaaatgatggtggcttagaccagggcaggaagtcttgaagtggtgagaagtgacaacattctggaaatattttaatgtaatatttgcgtgtatatttcttctggtaaacagcaaaaattaaatctccctctcttgtattctagtcacttagtcacgccatagaataaccactaatgccagttttcaatttttggtccaacttcttacatgcatttataaatacatgtatatattcttccctctgccacttttttattaataaatgacggcatgttacacacctaaaccctgctttttactgaatggtactctagggaaggaaaaattttccctgtacacctctgagttcttaactggggcccctgtagcaaaagattgattaacaagaaaaaaaacaaacagaagtttattaacatgtatttcatatacacatgggagatacccagggactgagtaattcttcaacaggtggcttagaactccaggctcactatagcatctttaacaaagaagaatacattttagagaaggataatacattttagacgagacaaaggaagaggaccttgagtgtctagggacagcaaattgtgggaaggcaaatctatgggaaactaattgtgataaaggctagttagcaaagtttgttatgtagagtcctctggtatcttctccaggctgataaagatctaaagtcatttccagtgattagcttttgttctttctattagagagggaaggagagacacctttgtaaatttatgtcttctttttaggcaaatagcgggagggcagagagcttttttttggttccgcttctcagttgcctttagctcaaaataaccatatggcatattttggagtggaatattctgctgctcttcaataccttggattgatagcgctatctcattttttctttgcataccatttcattgtgtggtaccatttcactgtgtggatttatcattatttatatccacatataaatatattttatattctagtgcatacataattttacacatgtgcaagaatatctgcagaagtcttataactgcaattattgtattaaaatattgtaattttgatatacaccatcaaattgccctccactgaatttatatttacatctatttactgtgtatctttacacattaaaaacatttcacttctttcatattcataacatctattgaaattgaggctattcattcatagggtacattcttctaacaaccaaagacatcttagggaagaaatgagaaggcttgtcactcaattgtgcattgaaactcaacagtattttagtactatttgaatatagtattgttaaataaaagttatttaacaataatttttgttattgatggtaaggcagactttattcaaaggaagtgtcaactgaagaataacaatattcataaatttagaaaggaaaattttacttctcaaaaagagttgtagcctgctaggtggcccttctggcaggctgggaagtgtagcctccagccagaagccagaaacagacacttcagtcagaagaataagacagggaagggccaggcatggtggctcacgagggcagggtgtggtgactcacacctgtaatcccagcactttgggaggccaaggagggtggatcatttgaacctaggagttttaatttttagcagagatgaggtcttgctttattggccaggctggtctctaactcctggcctcaagcgatcttcctgccttggcctcccaaagtactggaattacaggtatgagccaccatgccaacaacaggacttctgataaacattcttaaatttccaatgctgcatttatgtacagtcgtcctggggtacccatgggaggatttgttccaggaccccgcttggataccaaaatctgcagacgctcgagaccctgatataaaatggtgtagtatttgtgttacataacctacctacctacacacacacacaacctaatacaacacctaatatataacctacacataccctctgtagattacttaatacaatgtaaacaggatgcaaatagttgttatacagtgtagttttaaaatttgtactattttgtattgtattgttttttatttatttattcaaaatattttcaatttgtggttggttgattcttcagacgcagaacccacagatatggagggccagctgtactcctctaaattcaagtccccgacttcacaccttcacctacttattctgtgggttcttcaagttgtcaccagggtgggcaccagcagcaggtactggtgaacacctggggaggtggcaagatgcaaggggtgttccatgaatagctgggataagatatacaaataactaataaataactcataaactcatcattaactcataaactacttctttcttaaagctagagcttcctaaccagctgattcagttggagaaagtctttgtcaaaccttccctgttaaaaatgtgttccatgtgttgctagtcctggctgtgcatgctgtgccttaggtgggctgggagggataaaaggcagagaatcactgttccaggtaaagttcttagtcgcttcccctcccgccatgctcagtgtgcttccttttttccatgttctttctcttcgaagggtctccctctagttacccaggaatagagagagctaagagaagactgtcagaaggacctgactcaagagagtccccttctctaactctttcaacccaaagccctccgtgggctctcctactatttaggggcaacagtggcaattttttaacagagtcatctcaaatttgagtgtagcactaagtactacgaaatgatttttgagagcctttgcttactatggtgaaaattacacagaggaaaaaaagccatcagttgaaacccatccggaaagcattttaaagaagcctcggttatctgagtcatcccagaagttgttctaaattttaaggagccaaatgaaattattttttaacttaatgctagtagggcaagtgtatttcagagggacaattatggtagacttctattttatgtgctgtttgggatccaataagcatccccgtttggctggggtctggtgacctgaggctgagggtgtgtggtggagagcctttgccaagcctgatgatcctctactgaggttagatgctcaggaacagtcagaggtttttgaaaaggggctgttaaaattggacaaggctgtacttcgatttcacattgcattttaattgtaacaagacaaattgcaacactgtagatctgttcaaaaaattttcctctctctcttcacttacaaatgcagggctaaacattctttagatattagcaggcctggtctggccctctgcctaatgatggggtttttcaactctctgaatagccctgagcctcagatgtggcatcttattcatccatcggccgaggacagagtgaggacagagtggtcggggaggtggaagtatttggacctttttattgctttgcttaagggcaaaattgtggtctgcagtgacctccagtcacaactttcttatctcatttgggatcttgagggagcagtttcctcttcattctttcacagagacataaaagcaagcgggtatgactgctaaacaaggaggcattatgccaggaattcacagactccacgtgctctgctccctagtggcggctgtgcaggccatgtttccaaaggatcacaggggtcttggtgtgccctgtctgactgatgatcaatctcagctgtgagtgaaaaactgcaatggtccctgggatctcaggctccttcaaaggggtttttttctgagagtcaccctgaatactgacaaagtcaagagcctcagccgagagagaacttgggcagttgattgccttgaggaggtgcttgcgtgtgtgtatgtatgtatctctgtaggcatgtttatgtgggtatgtatatgggtatctgtgtgtgtgtatgtgcttgtgtgtatgtgtgagtgtgtgtgtgtgtgtgtggtgggagtgggtgtgtgagtaggaaactcacagggagaggagttaggagagcagatctctagggagaggggccacagtgatgcaccaaagttttcggatgaaatgaccaaacaatgttggtgctgtagtcataaaaaaagaaatgagaagaaactgagtttaaggagattttacagtaatgccttcatgaagtctttttagaaatttcatctgtacgtgaagtctctttctctcctggattcccattctcttctttcccatttccattgtgctacttaccacatttcaccttgatacttgctgtagatgtacgtatctctgtatctctcttacccatttttaactttgtgtgtgcagggaccatgatctttatatcacccgagtactttattcgcctgtcatacagatgatactcagtaacgaactatagaaatgattcctgagcctggagcggtggctcacgcctgtaatcccagcactttgggaagctgaggcaggcggatcatgaggtctggagatcgagaccatcttggctaacacattgaaaccccatctccactaaaaatacaaaaaattagccgggcatggtggcaggcccctgtagtcccagctactcaggaggctgaggcaggagaatggcttgaacccaggaagcagagcttgcagtgcgccgagatcgtgccactgcactccagcctgggcaacagagcgaaactcttaaaaaaaaaaaaaaaaagatccctgaaagtatagtcttcatactcagtaaatacttgcagattgagtgcattttcaacacctttctgaattttgttgacattgttggaaaaacttgtaattaggaaagagtaaacatttcagtattctaagtggttaataatcatataattaaaataataacataagtggtaaacatcttgagtttcaaagacttttgctatatccatgtcatcactgacattataaatacatgattttagcatactaatagtcacctaacttctgtgtctaaatgtgtgtaaaatgagattctattttttttttttttgtgacggagttttgctcttgttgcccaggctggagtgcaatggtgcaacctcagctcaccacaacctccacctcccgggttcaagtgtttctcctgcctcagcctcccgagtagctgggattacaggcatgtgccaccacacccggctaattttgtatttttagtagagatggggttttgccatgttggtcaggctggtcttgaactcttgacctcaggtgatctgcccgccttggcttcccaaaatgctgggattacaggcgtgagccactgttcccagccaaaatggaattcttaatacctgttttatctaacagggctgcaatgatcaaaattttcagtaagtgtcaaggccctttgaaaagctaatagtgttataaaaagattgagattgtagagtacatagtatttaagatcttaactgttgttatagagaaaaaacacaatgcacacctatccataaaacctctaaaaggcatggaaaaattttagtatatgtttttaagcactttacttattgctttcttgagatactttttaaaaaatgtcttggtggctaataatgatgatgacgacggtggtactagaaataccttctgtagccttttataattgataaagctcacatgcattatctcagatttgacagttcttcactggaggagatgagcagctctttgcaatgctaaattactgttaaaaagagtcaaactgaaccttaaagtcattctaatgcatatatattaagtgaacattacactcaatgttttgaaatacatttactgattttccaaagacgtctgaaaatttaaaaaacatattgaggtagttgagcattatatacattcctataagatgacagtgttatcatagtctgctaatgtggtccatttcttggccaagctttttctttataattatgggaaggcactgggcagagagcagttctgcctccctccccctttctctccacttcttcttcctgcacccctcatgtgtgttgggtgttggaatctgctgtcccaagaggtccccagaagctgtggcagaagttgccactaaggggtctactcagctgattgatgaaggcggtgggcactctccacggtaaagggtttgcaaatattgactgtcagatagccaagcaacggaagtcatcgaggggacaatgtttcttactgatttatggttattgtgtgttctttcccacaaatgcctttgtgttcttattttgtgctccacctaactcaggaactggctaattagttcctagataatccagagttgactgaattaaaatttaagagcacagcagatgtccacattgcataatgcaggtggacagcacctggaatccagaacctttgctattgcctggatgcctgactttgatagtttccatattcaactaccgtgtgtagtaaaacaaggtccagccctgaaccttgttggtactcgtattacagtccttattatactatattctaattttggttgattccatttgccactagattgtgagctcctcgtggatactgttggcattttgctcatctttatacttccagattaaggtgcctaatgtatagtagtaaagcagtatagtttactgagtgaataaataaaatgaatgagcattcatgaaaggatgtgttcggtgaatggagagccatttaaaatgtcatagatttcataaatttctctggtgtctacgtctcctgaaggaaaaaagaatggttttaacacttatttataggccaggtggtaattaagaattgactcagagctttgggaggccaaagtgggaagactgcttgaggccagaagttcgagaccagcctgggaaatatagagagaccttatctctacaaaaaattttcaaaattagctggatgtggtggcatgtacctgtagtcccagcttcgtgagagtctgatgcaggaggattgcttgaggttaggagtttgaggctttggttcactataatcatgcctgtatatggccactgtcctctagcccagacaacatagcaagaccgccatctctaaaaaaataaaataaacttaactttaaaaccctattcctggctggaagcagtggcccacatctgtaattctagcactttgggaggccaaggcgggtggatcacctgaggtcaggagttcaagaccagcctggccaacgtggtgaaaccccatctctactaaaaatacaaaaaaattagccaggtgtggtggcaggcacctgtaatcccagctacttgggaggctgaggcaggagaattgcttaaacctgggaggtagaggttgcggtgagccaagattatgcccttgcgctgcagcctgggggacagagtgagactctgtctcaaaaaataaaaataaaaaaatttaaaaaccctattccttttaagattatcaatacattctaataaaatggtcttttttgatactgctaatagacattattaccattatgatttatatagaacttaaaataattttatgtcagaaatatttttagttttagccttttgctaacttagatgggttgtcctctgtctaacttgctgtcagaaagtttttgatgactgttaaattcatcttggaagagctgaggaaccatgagaagaagaaaaaaacaaaacaggaatacatagtgattcgagggttaataagaaataagacccaactagtatttattggatgaatgaatagataaatgaaggtgactgtttgggctgctaaaacaaagtgctttatttatttatttatttatttatttatttatttattgagacagggcttcactttgtcacccaggttggagtgcagtggcgtgatcatggctcattgcagcctcaacctcctgggctcaagcaatcctcctgtctcaacctcctgagtagctgagaacacaggcatgcaccaaaatgcttggctcatttttaaattttttgtagaaatgtagttttgccatattgcccagggtggtcttgaactgctgggctcaagcaaccctcccaccttggcctcccaaaatgctggaattacaggtgtgagccaccatgccctggctaacaaagtacgttagactaggtggcttataacaactggaatttatttctcatagttctagaggctaggaagtccaagatcaagatgctggtagatttggtgtctggtgagggctgctctctaactcatagacagcacctttttctgtgtcttcacatgacagaatggagagctagtctctggggtctcttataatagcactaatcccattcatgagggctctgcccttacggtctaatcacctcccaaaggctccacctcctaataccatcactttaagggttaggattttaacatataaatttcggggacttaggacacaacatttagaccatagcagaaggtctctccaagaaaaaatttacatgcatgaaacatgaaataataaataatggggttagatgccaaaaagagatgttatcaattggatttcagagaagagaaaacgttgtaaggaaaagctccaagaagggagtgaaatctaagctgggccataaggaaatcagtcagtgtgagaaaataactttgtgttagttttctgttgctgtgtaacaaattatgatgaacttagctgcttaaaaaagcatacatgtattatctgtctgttttcatgtggcaggagtctaggcacagcttgtctggatcctctgttcagagtattaaaggctgaaatcaaggtgctcctggccaagcgtggtggctcacatgtaattgcagcactttgggagaccgaagcaggaggattggttgagcctaggagttcaagaccaccctgggcaacaaggcgagaccctgtctctacaaaaaaaataaaaaataaaaaaattagaagagcatggtgatgcacacctgtagtcccagctacttgggatgctgaggtggaaggatcacttgaacccagggggtcgaggcttcagtgagccataatcatgccactgcaatccagcctgggtgacagagtgagaccctatctaaataaaataaaataaaataaaataaataaataaataagaggtgcttctttctggagctcagttgacctctttgaagctcacatcatttttggcagaattcagttcttgcagtggtaagcctgaggtccttgttttcttgttggctgtcagtcagtaactgcccacatttcttgccacatggccctctcagaggccctcaggcaaccagggcagctgtcttcatcagtgccagcaaaagaacctctcactccttccattcttgtttaaatatctcacttgattaggtcaggcccaaccaggaaaacctcacttttgattaacaaagtcaactaattctgggccataattacatctgcaaaatctcttcacctttgccatacagcataacataatcatgagagtgatctctcttcactttgccgtattctattggctaaaagcaaattggagctcccacccggcctcaaaaggattatacaaggtgtgggtcatagggggccactttatgatcctgcgttctacagtgtctttgtttacaaatgattctttttaaaatttttattttattgtgttaagaacacttactatgagatctaccctctgaaccaatttttaagtgtaggatatatttttgttgggtataagtacagtgttatacagcagatctctagagcttattcatctttcttgactgaaactctaggtcagctgataataactcttcatttccctttcactccagtccctggtagccaccattccactcttttattctatgaatttgactattttagaaacctcataagtggaaatatgcggtatttgtctaagactggtttatttcgcttagcagaatgtcttcaaggttcatgcatgttgtcacagattgcagaatgtccttcattttcagggggtaaataatactccattgtgtgtatatgtgtattattttctttatccatttatctactgataggcatttaggttgtttctgtatcttggctactgtgaataatgctgaaatgaacatggaagtgtgaatatctcttcaagatcctgatttcaattctttcagataaatacccagaagtgagattgctggatgaatggtagttctatttttaactttttgaggaatctctaaactgattttcatagcaaccacaccattttagatactgaccaacagtgtgcaaagtttccagtttcctcacatcctcaccaacatttttttttttataatagccatcttgatagatgtaaggtaatatctcattatggctttgatttgcatttccctgatgattagtgacaatgagcaccttttcatatccgttggccatttgtatgtcttctttggagaaatgtctattcaagtccttaggctatttcttaattagatattaatttttttaaataccaagttgtagaggttgtaaatgattcttttgttgttgtttgaacatgttttaaaaatgaaagtttttaaaaagtcattttttataaaaggccctggatattagatgccaggctaaagaaaatcaattctctgtacttggagcttttgcttggggaccagctgttcatcgttatgaagggagaagaaaggagcctagagcgagctataattagagaaaccacatcatcattttgatatactgcaagaacttcctaacttcctcttggctgttgatcttgactgtctcccatctgctaatagtcacagtcaaggtgatctttccaaaatgcatatccaagcatgccactaccctgcttaaaatgcttctgctgattattggacagaaccctcctaggataggactgccatgctgttcagattcatgtctcaacatgtgctttgtgcttcatatgccctttatccacgctcaatgagagagtggcgtaaggattaatggagggatgaatttgagagacattcacaggtaaaatcaccgggatgtggtgagggagagtgtcttggtctgttttgtgctgctatcacagaatactggagactgggtaattcaaaaagaacagaaatttatttctcacagttctggaggctgggaagtccagtatcaaggtgccagcatctatctggtcagagtcttcttgttgtgtcctcacatggtggaaggtagaaaggggtgggcctattcctgcaagccttttttatagcagcattaatccactcattaatccacagatactgcatgaaggcagagccctcatgacctaagcacttttccttaaactccacctcccaacattgttgcactggtgattaaatttctgacccatgagttttgagggaccaaatagcagaaggagtaggctcacctctatgctatttagaccatagcagagggtgagtctactccatgcatggaaataaggggggcaggtgcagtagcagatgtgggagagaagataagttcagtttgaggtcgctgtagaagattacatgcaaggactttttgtatggttggccctgtttcgggcactgtaggatcgataaaggaggtcccagacatgaactctagagaggtgagaatatacattgcattatgaaattagagattcacaaaaggattatcactggtggtagtttccagagatcgaatagtaaaggtgtctgttaatagccaaatgaaattttccccactccatgaagtacccaataaaattaatgacagatagaaggttgcttttcattgtttctgaggcttaaatattaaacaagaatgacatcgttagggcctaatttgggggcacacaaaaatatcaggagaagagatttcattcttctcccagttatctcaaattaattttgtctttccaagtgtcttttgtcatttaacaatctggttctgaagcttgaagttcttctgtgcttgttttggactgtatagaagtacctacatttttcttctactgttttctcgtgagtgtcaggctaaaaatctttttagctgccctagtctacactcctaatgtgggagatgctctggtgagaataaacaaaaaggcatgctctttctttctttgtggaagatggattctaatctctgtttgtctcttttcctatgtagctaagtagaatctgccatatcaatgtccagtcagtttctagctcatctagttcttatgattcctcccacggtcacttgcatgctgccattgctttgggcctgtggctgctaccagtgcttctgtggccgcaacctgactccctgctggcaccagcaccagctctgcctcccgggaagtgtgctttactgtctgggatcccccagtaggggcgcctctgccagctgctgctgtccttgctgccccccagacacaccaagactgaaagttatctgcaccattgtccataccaccttattaactgctgaagtcctagtctctgttccaaagccccttaactttgaggacatagtttctggtaaggagtttagaaagcccttctgaaggggtaataggaggaagaggcactgatactgatgtgttgtatttccccaagtcaagcctgcacatctctcagtgctttcaggcatgctgtcatctcagagactgggcacacacacatcaggatttcccttcctcttccccaggaagcagaatccaaacccttctagtaggggtttgttgggaggccagggaggttgtgggcatattctttgaatctagttttcttgggcctaaaagtgtgatggggtgaaaattgagcaagatgaagagcttttaaactaagctcaggaaagcctgtatcttaggtcttccacttagtgacagatcatctactcatgtcctctgaaaatgttcatctctcatgatggaatctgtcttctgacaatgtcccaagtcccttgaactctggcctagctagtcttgacttctgtattagtctgggtaatgctgggtgatgctctgataatgtacctgccacttacacagaatcttttgtgggttgtacattcttctccatcttgtggctatggcatgtaaaacacatgcctcctgtcttagtttcctagggctgctggaacaagataccacaaactgaatggtttaaaacaacaaacacttttttctctcagggttctgaaggctggaagtccagaatcaaggtgtgggaggcacatgacttctctgaaggctctagggaacaatccttcttgtctctttctagcttttgcaggttgccagcaatcttcggcattccttgctggtggatgcatcactccagtctctgtcaccacctccaaatggctgttttcccggtgtctctctgtccaaattcccctctttttttaagggtgctagttattagattagggccaaccataatccagtgtgacctcatcttaatttgattgcatctacaagaccctatttccaaagaagattacatgcacaggtgctgagtatcaggtccctgatgtatcttttgaggagacacagttcaacccataacacccttcaaagttgttcctgaagaagagaggcccccggctcttatcagtctcacctcagaataaatatatgctagttttgttctcagtccagccccaacataactacaaaggaggctagtacattcatgggagcacatggctatttggtgaacattacttgtctctgtcacatcctcatccagttcgtttcctctgatcccagaatgctctggggaatacatgatagtttctatataatgtgaaatatccatcaagaacagcagtgggttcctgcaaagcacatggaaggaacagacttggaaaattgctcaaagaaaagaaaaaaatagtttatgtagtgtgtaaaactgtcttatttttgtttggttctttgatttatcttaatccagaggttatgaaatggcagtcagcaggttgcatctattccagagatttttttttatgtgtgtggcccacacagtgttcaagaaatatgaacagactgggcatggtggctcatgcctgtaatcctagcactttgggaggctgaggcgggaggattgcttgagcccaggagtttgagaccagcctgggcaatatgatgaaaccccgccagtacaaaaaattagctggacgtggtggagtgcacctgtaatcccagctacttggaaggttgaagtggcaggatcacttaagccctggaggtcaaggctgcagtgagccaagattgcatcactgcacacagcctgggtgacaaagtgagcctataatcccagcactttgggaggctgaggtgggtggatcacctgaggtcgggagttcaagaccagcctggccaacatagtgaaaccccatctctactaaaaatacaaaaaattagttggatgtagtagcgggcggctgtattcgcttgaacccaggaggcagagattgcagtgagccaagatcatgccattgcactccagcctgggcaacaaaagtgaaactccatctcaaaaaaaaaaaaaaaaaagaaaaaagaaaaaagcagacaaatgtccacacacctagatttaccttgaacaatgggaagatttgacaacatctgggctcacatttacacagaaaactaagaagaaggaaaacagccaaataagagctgctccctgcggacagtcccgtttgcagttcaccctgatgcccaccattccctggagaatcaccaacactgaggctgtcacttctcatttgtctttgtgatttcagtgttgttttcttagagatttttttcccttatatcttgctctttctacccacttcctttatctcattggcccctgcaggcatttgtgtttgtgacttcattttttagtagaatctgcattttcatgtatcttgtgcttctaagggattaagtattataccagagtatcaccttgaacttagcactctgaggttgactcctgctgtagcatctgcaatagtagtgatttaaggcgaatagttggtaaagctccagaaatgtctgtattagcccagaaatacctataagggggtggataaatatttgcaatgaaatattcacaagtgggatatttgggtaaatttgaatataattaaaatgaggcctgttgattcactttgaggtaaatctttactgacatagcttttgtgccttttctccctatacagaccactggagcgatccagcgaagatgtggatataatcttcactcgactgaaagaagttaaagcttttgagaaatttcacccaaatctccttcatcagatttgcttatgtggttattatgagaatctggaaaagggaataacatgtaagaaatgcaactcttgtagtatatttccatgtatggtttatgctgatttgtggttactttatggagataaatagcaaatggagtatttatgtgctaaatatttgagcttcaaccaaaagtattaaggtgacatttccctctagtctgtttattcagttgcatgtaggtgtttccctaactcctttgttcacagaacgtaaatggttcttccaaggcaaccaactttctagatggagctggagggatgtaatgtttcacacatttagctatatctttagaaattcacataattgtcttctctaatccaagaaatatgtggccaataggatattaagataaaagttctcttaactagtgctgatagtaatgttttgaattaatgccagtaatatcatctattccaggtgtgaataaggggcagggagatagagtaacagttggattttttaaaaagtattttttcattaaagaagtaatagttcttctgttggaacactttatgctgcactcacagaaaactccctttcaactaattggaatattcaatgacttatacaagaagaaaaaaaaatcaattacttatacagaagaagtcctgaggtagaatgacttcagggttggttagtgaagtgactcagtgaaattattaaggcttcaggtccttcctgtattttttgtttttgtatgcattctgaggtgttgggctttgtcctcagacttgtcccaaattgttctgacagctacagctgttggatgcattatttactgatacaaaaacatcctgctgaaggactatttctttctgggtctctgttttagaagtctcccagcagccttcttgtattgactcattggccagaaatgcatcacatgcctaagtctaaaccaatcacttgcaaaaataatgggatcaccaggactgatttagaccaatcatgattgccctagtggagctaacacctagccctatagatgagggtggaaacttgtctaaaacctgggttcagttagacaagagggcatgagtgtttctgggtgggaaagcaacagggtgagtcacaacgttattgtagaaaatttagaaggtcaacaaaataaaaatcacctacagtttctaccattaatattttgtgggccaggcacagtggctcacgcttgtaatcccagcactttgggaggctgaggtgggtggatcaataggtcaggagattgagaccatcctggttaacatggtgaaaccctgtctctactaaaaatacaaacaattagccgggcgtggtggcaggcacctatagtcccagctactcaggaggctgaggcaggagaattgcttgaacccaggaggccgaggttgcagtgaaccgagattgcgccattgcactctgcgctactctaggctggagtgcagtggtgcaatcatgactcactacaaccttgaactcctaggctcaagccatctgcccacctcaacctcctgagtcgctaggactacaggcatatgccaccatgtcatcattaattatggttcccagaagcttgctcttctccaataagcactagccttgccaggactcggttgtcccacgagccgtcatgtgatttttcattgagttacttgacctctgactttaagtgtgaagaggattttaaaatatcaagtcactccatctagttatttagttaggatatttaaaaggacagttagtttgcatgagatttttgaaccagtgttttggaattactttcccaaacttggtcttaatatgatatgggaagtatggttctatctaaatacctaaatattttctctctgagagggacaaacttagagcaagatcaggttcaaaaatttctgatgaggatcatttctaaatgcttaaaagcagtgaatttataaaaagaataagaaaatggacaatgataatatagtagttaaaatttttaaacaaagcagattttggttttttaaatcaatcattggtcaccttaaaaggagaggtgctagtctagaaaacacattgcttttaatatagtcttgggaaatatcagccaattcttcttaaattcaaaggatcttataacatttaaagttatcatctttattacagctctgtaagtatgatagagttctctttaataaggttccacttcacagaatattgaataaataggatatagctttgttgacagatgaggtaaagaaaaacatgttatgttcctgtgggcaacagataggggaagggtggtaagctcagttaggtccaagacatgcttggaccagtgaaaaactggcagatcatatagtaaaaccaagttgtatctgttatatttatatcacaatttttttttcccagtatttcgccagggtgatattggaacaaactggtatgctgtcctggcagggtctttggatgttaaagtatctgagaccagcagtcaccaggtaatatggtctatttttttgaaagtaggatttattttttttaaagacttattatccctatgtcttttatgccattaaaattacattttcaagtccatttcctctttcccacaataaggagttcagcactgtttgttggattcctttattaagttactcaacaaacacctattgaatgtcttccctgatttgagtatggtgccaggtgtcaaaacatgaaatgcaagaacacattggggctgctttctaggagcttgaggtctatttggaaatgcaagcaatttcagtgtgacacaaattgctgtatagggtgaaatgtgagtgaaggagaaggagaagtcttcctatgtttcctcttggatcctttctccatctttgtatcttgaattttctttgtcctagaagtgatcccctcatcggccttgtaggagatcttgtgatgcaggggatgtgtggctgttgcagtccccctgaaatctctatttctctgccttgtcttttcaaatgtggaaggctaataatattattttccctctaaagtacagcactggctttattttcattagtcacctctgaggagtttggcatcctagtagatgaaactcattctttttctgttcacaagatttatgaatattaaaaaaacgaaaacaaaattaaaaaagaaagaaagaatattaaaaaaagaaaaaatatataaatatttaagtcgaacccagggccttctttcacatctgcagtgactcttgctctgtcattaagacaagtggccaaaatgtacacaacctcactgtttagagccaagaatctcgagtctgaaaagtatgacccataaaaggccaccatcaggtatcactatgaaaatgttccaagtcttatttccacatattcaggattcagaaaaaaactgaaggaagagaatcagttaattgtgaaatctgaaagaattgtccaaaaaaattaaagaattatttaaagggacaaataaccttctgccaagtgtcatatttaaggcaatgttttggaggctttttcataggtagcacacttcaaatgtgagaaacatttatgacacaccaaatttgaggtttacattttttaggaacttgtatgtgtattgaagttgtgggcagtcaccatcttaaaaatggagtggtatcccaaaagattgctggtaaggtgtgcatttggaatttgcgatgtagtttcctgggtgatacccattgtaatggagggttaaattctcaggccagtgtccaaatcctgtgtaatccatagcatactctttctgtgcatcagtgcatgaaaattccattagacacagcctggaacctgtgcttcccaactttgatggtacttttcctcttgctgtctctcacagggctggctttctcttggatttcagagacagtcaaggtgagaggtgggttttgattcttgtaagcggcctcagtttcgaatgggaaggagaacagttagcatttcttggatatttgccatatcctatataatcaagatatttatccatatgtgatttatccagtccttcttggatatttacttggcagtgttccaagcacttaacaggtatttatttacttctttaatcctcaagtcaaccatgaggtaggtcgtattactgttctcattttacagatgagaaaacgaagtccccgagtggttaaataacttacctcgagtattgtatctagaaattagagaaaccaagattaaaacccaagcagtcaggcacctgaacagatgctcttcaccactgctctccaccatttgactcttaagaaacatgaggcaacatgcaacttccctctctccctgccttttgtcatcctttcagattaccccatgtccttctttctgcatatctcctacctgtggatgctgtcctggtggggactctctgggcttttttgctcagagctgctcctggtacttcctttccccaggttttacctgcatagatgttccctggggacagggcctacacaggatcattctgctcagttcctcctgcagctcgagtggttcctgaatgagtgataatggagagagtggagaagctgaaaagagaaatgtgacaaaagagaggaaagggaagcaagatgagaattaaggaggagaaaagaaagaagaggaaatctcgagaaggagagagaaggagaatcagaaaaggaagagcagatgtgcctaaggggatgatacataacaccagctcttatgtgctgacacaccagatgtgaaagctggccgagattttgatggtattaaaatagtatctggccaggggtttcgggaatattgcccttaaccagttatctctcaccatggcatcctagccatgctataataacccataatagcagggttattagctacagattcaacaattttaactaaacttttaattttagatttacctataattttgacctcaaaaccaatgcagagaacttacctaagctgggctcggtcttcttttagttgttaggaatgagttaatttaataccaaagctggcttactgcttcctttatgtatttcatcccacaatgttcaaccagagttttctggatggatttgtatcactaaaataaaaggaagagaaagctcattgactcctacaccctctagccctctagagtacagcctgagataaacagggcccagctttccagccagttctgaaggtaggacatggtccagccacatgggagaaagaagctaaggagaatgaccaagatggcagagcccccttccatgccaagatgcttgcaagggagaaacaaaactgccatatctacccatgctggccttgtgatgggctctgggtctctgcccactaacaatgtggtaaatcagggggattgtttatcatgacagagtagtgccccatacaagtcagggttcttcagagaaacagaatcactaagagatagagatagagagagagagagacaggtttgtttttaggaactggctcacatgattgtgggggctggcaggtctgaagtctagagctggcaggctggagattcaggtaagagttattggcagaagcagaattcctcaagaaacctcaagggaaacctatttgctctgaggccttcaagtgagtagacgaggtacacgcacatcatggagggtaatcaactttaaggtctactgattgtaaaggttaatcatatctaaaaaatatccttacagcaacatctagattagtatttaaccaaactactggccattatagtctagccaagttgacacatacaattaaccataatagaccccaatgaggagggaaatggggttgggtgaaggccatgggtaaggagcaaggagagacctagaattcctacccctagagaccagaaaagatcattgctaagtgccttccttgtgtggctcgtgtgaggggttccatggacattaactgaattaatctttaggcatttgtgtcctgttttaccaaaggcttgaaaacaaggctcagtgacataggtgcagctttcccagggccacacaggtgtacatgggcaaactgagatttgaattcaggtctgacatcctccaaattgcatgttcttctgctgggcgcactcatgaacagaggtgtgaggaggatgataaaagtgaaggaggaaaagttacacagtctaaaagaaaactgaggaaagagaaaagaggtgatggcacagagtcaagtctttcagggaggatggggcagagtttcttgccagcctgctccttgctgccctgcatgtctgctttctcatctgagagccagagggatgtagtgacaaattcccaaacttagcactaggtttcagaccctcagtggggtgtgagccaggatggtggaagaagagcgggagtggctgctggcaatgggcgcctatgacaggaggctatgtgcccagtgtgtcacaagcattatcccaccagcactcaccacactgccctccccttagtgctgtggtttgtctcattttagaggctagatattcaacagcttgcccaaggtcataaagctgctgggtatctgggccagttctttgtgattctggggctcaatgcttgcccattgtggttgtataggtgccaaccagaaggaccggaaggggaaggaagagaggtggggagctgagccagccattaaggaataaggaatgcagggaggagctttccccttgcagcttctccaactcccacctgggtgtctgatgcagctctgagccccacagccctcccctctaagcccactgcccaggtgctgttggaggcaatcctcctcctaccctctctttgatctggcgatgcacagtgaaaggggtgtggccctccctccaaagggcatctggattagagggtggggtagataagtgtaggtgatagggagggaaagtgaagtacactgtgtacaagatggagacaaaatggttagaactgacggtgatgggatgtggaggtgtagagagaaagggaggctcctgacttgggtgaagaggtggacagtgatgctactaatggaaatgggaatacatgagggagaccacctttcccagattctgcaatagtattttatgctatacatttattaggtatgtatattagtccattttcatgctgctcagaaagacatacctgagactgggcaatttacaaaagaaatgagtttattggacttatagttccacatggctagagagacctcacaatcatggcagaaggcaaggatgagcaagtcacatcttacatggatggcagcaggcaaagagagcttgtgcagggaaaatcccatctttaaaacggtcagatcttgtgagattcattcactatcagagaacagtacaggaaagacccacccccataattcaattaccttccaccaggttcttcctgcaacacatgggaattgtgggagttataattcaaggtgagatttaggtgaggacacagccaaaccatataattccatccctggccactaccaaatctcatgtcctcacatttcaaaaccaatcatgccttcctaacagtctcccaaagtcttaattcatttcagcatcaactcaaaagtccacagtccaatgtcttatctgagacaaggcaagtcccttctgcctatgagcatgtaaaattaaaagcaacttagttatttcctagatacaatgggggtacaggcattggttaaatacagccattccaaatgggagaaattggccaaaacaaaggctacaggccccatgcaagtctgaaatccagcagggcagtcaaatcttaaagctccaaaatgatctcctttgactctatgtctcatattcaggtcatgctgacgcaagaggtggaaggcgtgttcccatcgtcttgggcagcttggtccctatggctttgcagagtatagcctcccttctggttgctttcatgggctggcattgagtgtatgcagcttttccaggtgcatggtgcaagctattggtggatctaccattctggtatctggaggataccagctgttttcacagctccactaggggttccccagtagggactctgtgtgggggctctgaccccacatttcccttccgcactgccctagcagacgttctccatgaaagccctgcagcaaacttctgcctggacatccatgcatttccatacatcctctgaaatctaggcagaggttcccaaacctcaattcttgacttctgtacatctgcaggctcaacaccacatggaagctgccaaggcttggggcttgcaccctctgaagccatggcccgagctgtaccatggccccttttggtcatggctggagtggctaggatgcagggcaccaagttcctaggctgcacatagcaccagtaccctgggcttggcccatgaaaccattttttcctcctaggcctctgggcctgtgatgggaggggccaccatgaagatctctgacatgtcctagagacattttccccattgtcttggggagtacatttggctccctgttacttatgcaaatttctgtagctggcttgaatttcttctcagaaaatgggattttattttctatcacattgtcaggctgcaaattttccaaacttttatgctctgcctcccttataaaactgaatgcctttaacggcacccaagtcacctcttgaatgctttgctgcatagaaatttcttctgccagaaaccctaaatcatctctctcaagttcaaagttccacaaatctctagggtagggataaaacgccaccagtgtctttgctaaaacataacaagagccacctttgctccagttcccaacaagttcctcatctccatctgagactatcatgagaacagtgcagaaaagacctgcccccataattcaatttccttccaccagttcctcccatgacatgtgggaattgtgggagttacaattcaagatgagatttgggtggggacacagccaaactgtatcagtatgagtgatttgatggaattttttctgaaaaaaaaaatcaacctctttcttgcatatggtggtagaaagatatatctgtatataaatttcaagaatacatggggtgtaactattctatttgactcaaattcatattgccttcctgtttcaagttaatattactttttctcccttcttgtcattcccttatattttttactgtctaggttaaaaaacacacagcttcttctgtgtaattggtctagcaaattcttcctgaattttttgaatactgggttgagggtcctacttatttttcatcagcaatatacccagagcatgtagtagtaactgttcatttacagagcatttcaggaactttctttggtttgagcctaccctgtttgggaaacagctatgctgtttcttgcttagtgcctgatgcctgagtagctgttcaggatgacgcagtggtgagcctgggaacggggagtacctggcctcctgagcccatccagcattctgcctctgctctcctgtgctttaggcagtgcgtgcagtcattccctggggaatctgcaaagcctgcaaggcatctgctcccaagggcacctgctcacaagctcctccagtgtccgtagtggggtggagaggggtgatggggatccttttttgcccctggattgctgaagcctaaaattatatattaaaaaaagtcatgattctacatttcagagaagtattaactacagacatttcgatgagtgctgatgtacacttcaggccctctcttaggaagggaggatggagaaaaaagctatcgggctgcaggactggaatggctcaccttccagtgtcacccctggtcagcccacccaccagaatggccagaagttggccattgtaggaggcgtgagttgcaggctgactgggccttaccccatgggtcttctctgggcccaggaagcatcagatagtggcatggattcctgctgagcaggggaacccactgctttcccctctcacagtcaggccctttccaggcaggccccaggaccacatgttgcttcttctctttgttttcctctcagtcaagtttccctaattcaaggcttcaagagactggaggggagacaatggtccctggacgggagggacggtggactctgtctgcctctcggagaccctcccttaggagctggggctgcattgctttcatttcttttgttactgccttgaaaacgtgtttgtcctaagaattgtaggaaatgcatagattattctgcccctattactttcaggaacttttaaaggctgacaaatccttgtaattatctttctataaattatatttatttcactactctataaaatgaaacctactgcaacactcttaccactatgcgtaattatcagaggcatctctcccagcttctcagacacccttcctgccttagccattcttcatcttaacccaaggaaaagagcaccaagaaggggacctgcccacagaccacttcatcctcctaaggtgtcccaacctggctgacatgttcacgtagatttccactgggaacatccacttggcctctatcaaggattaatccttccatttcgccaataatatctgtccccaccttcagtctcttgcctgagcctaaccaggacacatccacctccagatccccactgctgtacttgtctgcacaagatcctctcctgtcttggtgcctgtgtaacttaaaagttacatagggctaaaagtcagatattttgccttcccactagaatgaataatactatgggtgtattttttctcagtaatattttaatcgatttagggttagagatgaacattgggacaagttataagcaataaataacaagcttaaaaacaataaataggattataaatctcattgtatcagatattatccggctgtgtgtgtgtgtgtgtgtgtgtgtgtgtgtgtgtgtgtgtgtgtttacttcagagacagagagaaagggagagagaaggtcctgtttttctctgcagattttttaagtgaggggcttttttggcatagtaagtatcaaaatcctagatatatataagattttaaattaatctttacctctcaaaaagtaaaaaggcttttccagtcataggaaagaagaatttcaaatggctgctgacagaataaagtttatattgcaagatagaaaatggatggtttattaattctttaaaacctttacatctctatcacagatgcctattgaaagcattagtatttacccaatgcaacccacggtggttaaattcagagctcctttgaaattctattgccacttaattggctgtgggtatgcacagttagcttacttgtaaattggggataatagctcttatcttaaatgagctgatgtatgtaaagcacttagtacaaagcctgggatagaggcagagggtctgtgctttttgaaattaccatttcaagaaaagttggttgcaatgactgcaatgctgttgttttatcacaagagggcagtgccagaatagaaaacgcaggaaatgtacttgggatttgaaacagtagaagtttaacaatgttgttcagccatttcatggatcagagaatccgggctacacttggccttggtcatcacttaatttcatcccctcatctatcactgtgaaattatctggcacattttagctcaatttcagaaaaaaatctcatactagttttctccctaaagtaaaataatatgcttttatttgccttctcttttttccttctacagtaacaaatgtttttaagcattgcatttttgtttacaaaatttgaagaacatgtgtgtttcgttgtaatgcggatctctctacctttgtctgtctttctctttgcctctctgattcttctattcactcatttcactccgttattttcaaacagagaacactgccatcattggaaacattttttttctgagcacatttattgagcccataaaacgtgaaaggtgccaagtccacagcagttgtttgtaatctcctcctacttgtctatgctcaggtcaggctatttgttaggagctgattgggagtttattgagcatcctgcatcctgcatttagtttttttgccgtgtaattctttgtttgggtggttggatgcaaaactgcgtcacaatgctggacagactggctctccactgaaatgaggctggcctccctgattcagttaccagaatgctaatgctagtccattctcatcaaaccttcctgcggccggcttgcctgatcttgttaagctttattgaacatgctgattccagggatgtgttctaaaagtaacagaccttgtctttgctgtttgttagaaaacacatttgcctgagaagtattttgccctcttgatttggcaggaaatgcttctgcagcacatacaatctaacatcttgacaaattaagagattgggttccatttaattttattacttaagatgacttggagcacccagtaaattccagcactaaattcaagttcgtgaaataatcccaggtgctgtgaaacttaatggcaaatattgcctgtaggcctaaaataaaacttataaaaatatttgccttgttagaatttatgttcacacctgtgaatagccactgcagtccagcctgggcaacatagcaagacctcatctctaagaaagaaaaaaatatgtttctgtctccacacatttaaaggagcaattatttttcccttggtgttaactcagtatatgtccaaaacaataaatttgccatgagacaatgaactcttcttgagccatgaatatggaagtgagttaaatgtgcataataagatgatctgatagcccttgaaattacagtacaatttttagaaaatctagatgtacttaccacagagaattcttatgtctgtttaattgattgttagctattttaaattccatcagaatacctataacttgtgtaagttggatttcagctgatgcttatagacattatttatttgcaaggcacaagtgccttagcttgaataccagtcttagttatatgacacataaccattggctttcttaacaccattcccatttccatactgtttactatatttacaatgaaacaaataaaacgcctcatatgagaatgtctgctttaagaaaacccagtgtacataactcagacgtacaaagcagataaattaagaggtgattagttgcagtacaaaaggattctttgatttacagcacggtttgtcagaagggttcctttgaatacgagctcccccagagagctgaagtgttttgcagatcattcaatccacttgacatccagactaggggacagaaaaacttggaatttaagtgttgaaagccatcattagttgaagattaacaaaatgaatatagagattctctattatttaaatgatagaaaaaaactgctttgctttttagaaatatggataacccatacatgtttgtgactaagtcagaaataataatttccattatttatggatcacctgttatgtgccagaaactatacagcactataatggactctgtgtattactttattttgatttaatactgctaatgatattacaagtaagattgtgcccattttacaaatgaagatactgaggctctggggagcattttgcccaaagcccacaggtcagtcattggcagagataagttttgaattaagtctaccaaggcccgtggcttttccactctgctgcttccaggggattttccctgctgagcattgagtgttctgaccatgggtagcctccacgtgggagtcctttgcctgatgccctgccttccagcatgggcggcttcatcgacatctttattaacttacctaatgccagcttttatgaatgaagttaactggaccctgcatatcccactgaaaacactgtgccaagacagtgctcatgacttaacttcagctggtgcctggctgggtaaaggaaaagaacctggaatctggggggcatccatgatggaggtgggaaatatctcgagggcatgttcaggcagcactgggcaggaggggcagaggaagcaggaaggtggtgtgacacagcccccaggttagtgtggggaggggccaaggctggtctaaccaggggtagcatgatgagacttggcctgctgatgggagggagtcaaaagcaggcccagtggtggagatgggcagtgggcaggctgcctaagaagtctggccacagaaggactgccagagaggaactgggacccaggaagggctgtcaagacaggatactgtcactttgagaagaattagggtacccagcaggttatcaaggcagagactctgaaagacagaaactcagtttctccaaccagggtcagaactcagttattagaactgggacacaggatcagagtgggaaaagcagaaatgccgattttattttatttttttagagacagagtcttgctgtgactcccaggctggagtgcaatggtgggatcatagcctactgtaactttgagctcctggaattaagggatcctcctgcctcaccctcttgagtagctgggaccataggcaaacaccaatatgcctggctaatttttaatttattttttagagatgggggtctcactatgttgcccaggctggtcttaaattcctggcttcaagcaagcccctcacctcccctccaccaagtgctggtataacaggaatgagtgattcaattcaattcttaattacctgtttgtgattgtttaaatttcccctaatgaataagaggattgcctgggatggatttgatcctctaaggaggatcaagtggatctcaatattggaattggaagattagaagaggagcaatgccaaatgttttatattttcctagtgattttgacttatttggtattcaataaatacacagattggctgactgaaataagaatcaatataaattaaattggtaccttaacagattttccaactgaaccttggctaagaggtacttatacttactaggacaatctaagaagtatgtgggtagatcattagactgactagtttctgatctcagctcttctacttactagccatcgtcttgggcaagtcactgaatatccttgagcctgatttgctcaacctataaaatagcaatagtactactgatattgctggatcatgttagtaagagtgtctgcaatttattaagcatttgttttgagtcaggcactatgcaaagcagtttaaatacattatctcattcacctgttgtgaggaataaatgaggcatcgtcattgagacacttggccagtgtgtggcccagttcccactcacacacatgcagatcaacatgcatgctgctgcacaatgggactaaggatgggtggataattaagtaaggaggtctgtgttttagaaggaggagaaggagtgatccagtggactgagaaatgagatagctggatcagattggaggaaaaagccagatggcgtgtcggtgatatgccagaggcgattttgtgtgtgtgttcccatcagcccttgttatctagcagaattgatctcaggtaacccagtatgttttcctaacagaatgaagtcttcccatgtgtcacccaaaacatactgcccttacagtgtgtctgatgcaagtggtaagtgacactctggcctctgtccttattacagaagtctctttgggaatgctggtttggtccagtacctccccagaggtctcagtgcaatttaggacccacggccatcttggctcacccacctccttgttttcggtttccccagaagcagacctggagaaaaggatttggctacaagtggttttttagagatgatcttgggaaatatgataacagaatgggaaaattagacaaagaaggaaggaaagcctatcaaagtgttctagtaagagcatttccactgtaggcaactggactcactccttcagggggcctgctaagaaactgtgaagggcaaggaagctggggtgtttatcttcccactctcatgtcctaccactgtcatggcaatggttgcccctttaaggcattaactgcctagcactctgccctcaggcagagcaagggtgcagatgctcgaggtggcacactgcacagagccatccagaaagctacagatgacatcaggggtgagtgcagaatctggcagggctccagcagcatctgctaaaccaccatcacatattgaagtcgggtttttaaatctttacttcccttttgaaagttctcaaaacaaagtgcaatcttatcacaaaataggacattccttcactgttaccatttcatgttccctgcataggtgctgattgctttcatcagtctctgtgttactgtaaacatcttctttcagatggcctcgctgaatattaatctgcaaatgagcagaaaattaataaaagtgctcttttgaatagtccctattaaataagtattgaggcatgagcagtatgtataagcgtaaaagaaacggttatgttacatccagaaacagacactttcagcagcaggcgaaggcaggcattaagcccatctacagggtttcagacttggaatcctgacccatggagatctggttagatgttagtgtggatatctaagagtgcttcttctacatccactcatattcatcctgtccattcttaatctacctttcatcatacgtgctgagcaacatatattagttctgctaagtgagagaacatttggatgtcaatttctttatttgaaaattactctcgcagcacattgcaaggccctgcctgtgatttaaatgtaaataagggctagcacccatagactgtaaagatagtgaatagtcttcagggtgaaaatgttcttcttggcaccttctatttctctgtgcccaattatcccaatgcccaaccatacctcccaaattcattcagatttctaagtatatttgtcctaaaaaatactctgaatctgctgaaagtttgaacttgcaaaccatactcctttcaggtgaggttttccagtcctacttttaagatcatatcttgtaatttgtgactccttgtccttaaatttgagtggacgcagtgtgaaagagaagatctggaaaggactgatcccatacttaattctggtagaagaattgattcctgaaacaagcccagggtgcttgagctgatgactgcagctgggtactcactggcatggttttccccttacagaggtggtcctgacacagaaatacaccaaggagtacagtcggcagcactaccgtgatgaaattttgttgtatgtgataaaggcatgagtcaggttgaaatctcctgggaaaatccaagaagaaatccaatcttgtgtctttattacaagagttgattattggcgaaagacaggctcacgtgtgtctcccagcctctgtatttccttgtgtactgtttggtgacaaactactcgtgtcagggatgggaggtgataaagaagactgattaatccataaactgtacagctagctcaggaataactgagagcatcctagttcttttgcattatacttcgcaaataaccatatatatgtaaaatatgtggatgatgtcagtggtattacttagggtccatttcaggtttttaagacatgctggaaagtaaaaattaggcaaaagaattctttccgaagggttcaggtgatagaaaaatgaaataggctagtgggaacttcagggaacctgctattccagagaattgtgaaagtctgtgatttatcataatctatcttgtgtttttactagcatttaaaaattgctcagagagacctaactcattgactattgatatttcagttctggggatatttttgagtgaatttgtttgcagttgcctttctgcaaaatttattagcaggcttttcttcacttcttccctgatcttttattcttttctgagatattgattttattttccctaacataattttatatggtaatatctgtgcagaagcaatttgctatggttgaaggaactggattcttatgggcatttgtcttagtaatgtgattacagagtcactaacttgatcttaataacatttgcctattatcgtatattagatgcatgaaaggaaaactgggctttctaactcagaggattacccttgtgtgtctcccttagtttataatgccttacaaaattaatgtccaggtgattttgagtggctatttgcattatttgaaactagttaggattaaatccaaacattatcaccagtgttgcatgcagagaggaaattactttttttggtacaccttaagaaacttttaaatcatcgattcatgacattttataagctagtcacaccgtacttcatcggatgctgtttttactctgttgtggctgcaggaggcagcatgatacaaaaatcttgtaaacttatagtcagatttggttagaatctggccacactgcttatcaactgtgtgaactggggctgtgtagatccaccactctgaccctcagtttcctcatcttgtcaagacagacagtgccagtttcttatttaaatattgtaactgcactctctaacttaaaaaaaaaaaactgagctcagcttcgatagatttctcctcttttctgaaaacagatagtagttgtataaaaaggtaagattcctgctggcagctttattcataatatcctcaaagtagaaacaacccaaatgtccaccagcaggaggatgataagcaaattgaagcacacccatgttatgggaaactactcatgaataaaaggaagaatctttggatccatgcaacaacatggatgaatcttacagacattatgttgagcaaaaaagaagctaggcacaaaccggagaatatcgtctgacttcttttacatgaagttctaaaacaggcaaaattctttcatgacggaaatcagaacaagttatctgagtgtcttgcctggaaaggggcacgaggggacttttggggttcatagaaatgttctgtcttgatctggttggtaattactccggtatatatatttgtcaagacttgttgaactatgcaattaaattgggtgttttgccttgtacaaattatactgcagttaaagaaaagaaaacacctacccattagatgtttaattttctaatgactagttttttgggatcctcaggatgctgtgaccatctgtaccctgggaattgggacggcctttggagagtccattctggacaacacaccccgccatgcaaccatcgttaccagggagagcagtgaactgctccgcatcgagcagaaggacttcaaggcactatgggaggtgagccctaaggcttctttgtcaattaatgcagtttcagaaaagaaagggagctgccacatggataatggcattacagtcaagccttaatgtgttctgttctgagctggtagatggaatttaattttcaaaacttgtttttgaaatgagtgagtgaaaaagccattttgacacaagacatccttttttttgtttaatttagtgcttgctcaattttctgtagtttgacataccttataattatttcttgaatgaccatagagtgttttatgtattttctcccttcttttccacagatgtattcttaaccagggaacaaaatactttgacattttcttttgcattttaaaaatcatcattgacatgttccctgggaaagtggaatgaatggggttaacatctgcttcatttaagtgcttttaaaaatgatgcgccctataataagatatgagaaatggaggtacataaagatgtctggttacttgccaacttcaaaatgcataggtggcacagcagtgaatggatgcaactggtcctagtggcttttgcatttatcaatgcttaccagagccccttaaagtattgcactcatttacaacaagtatgaggaataaatcatcttacatgcagtcatggcaaatagagcacttataaaggcccagctaagccttgcatcttttacactcgttcttttcagttctttaagcctctgattttaacctgctccttgtctttgtccttagctcagtatgtccaagtgttaaaccatcaggctgcaggcttcgccactggtcccagtgtggctaagattttaaacttgatctaaaaagaattttgtgtaatcaaatagtttcctccagagccaaacaaatggcagatgcattaagggagccaacctgcaggtgaatgagtgatgctttgccttaaaagtcatgcaaagccttggaaggccttggtggtgaaacctgttacttttattcttggcagtagtgaataaattgtgaggttacttgtttgaaatatttctcttagaaagtattaaagagctccaaccgttctgtaaagttcagagacaaaagctagttttaggaaggaaaattgaaagtaggtttgcatgaggtgtatgtggagagattttctgtcaattaaaagggaccaagcttgaggcaaataagccactttttggatctttcattttaaaaggtaaactgaaaagtctttttcaaaaggggagtttggaaaactggttttcagaacaaaaatgatttctaactgtgatgtgtgtcattataaccacttttgtctctgatgacttactcaaattgctgagagaggatggtttgtggaaatattttaaagatttattttaattaggagcccttagtgctgagaaggaagtttctaagtggttgctacctgtgaacattaaaacaaacttattatttaaaaaaatttcaaatagacagaaaaatcaaaaagtatagtacaatgaacacccattcacccccactgaactcagaaattgttaatgtagagccatacttgcttcagctttgtttgttttttttggtgaactactttatcgtaaatgatagacatataacatatcaccctaaatattcagcatatatctcaaaaaacttagaatatcctgttacataccctaatgccattatctcacctataaaacaataatatcctaatattatctaatacccagtctatatttcaaatgtccttaattgtctcataaataccttttatagctttgtttcaaaccaggctccaataacgagccatgtcttacatttgattgttatatctaagtctctctctctctctctcctctctccctctctcccccttctctctcttactttccccctgccccatcatggcattgacttgttaaaaaggccaggtcaatttctcccaaattcaagatttgtctgattgtttttttcatggtatctttttttgcacttctatcccaaggtttcctataaatggaaattaggctaaaggtttgattagatcaagccaaacatttttggcaagaaaatgtgaaaagtgatgctgaggatattgctctgttgatgctacgtttgatcccttggttaggttgtatcagagtaccttttaggactgttttccacagttctttcccttagaggaaaaatatttaatagggacattgatatggagggctgtccttgctatctaaaaccttgtcacatgttttgcagttcagtgggtccaactcttcccctgtaacctcagagcatgatttgtgatctcccttgccagtggcataagtgtactggggacgacattcagagagccatttggaattgacaggagtggatagtttttagtctgacctcttttacagggtggggactgaaatctcatagtgagtaagagatagtcagatgtttcattatatttgcctgttcatgcaactaagtgtagagtgtgaattagatgctcaatcaatgttttaattgtctaaactgaaaatgcaataaaccccattatctagcaatctgttaatcaggacttcattaatgggcacacttgtgcacatgcagtacatgataatcctaaaaagttacacaattctaaagtaccttctgaataaaaaagattgaattctgtttattgtctattcatttattcataatatacagagtatctcctatgtgttaggtatatgtatatgtatgtatgtggatatagtcagatgttcgtatgtttatacatatatacaaatatatatgcttctgctctcaggctaggggcttctattccgctcagaggagacagaaaataaaaatcatagaatctcagagcataatatatcattaaataactttaggtgcatgatttgaatgttgatgatctatacatggcatatatagcgctaatctgcttgcaaaatatttgataaccagaacgcctattccttgatatgtcagataataggtttagtaaaattaatccatccttgttctggtaaaatccatcttgtgctgatatctgttagtaaaatttaaacccaagctcatactgtcagctgaagcctaagtcagctagatcacccaaatatcaaaagggaagaactatacggggaacaattatgtattcaggattcaggccaactcctgaatcatcactgaacagtaagagtgcagaaagaaggcatcagatggtgggaatgtaaactagtgcaaccactatggaaaacagtgtggagattccttaatgaacaaaaatagaactaccatttgatccagcaatgccaactctgggtatctacccagatgaaaataagtcattatacaaaaaagatacttgcacatgcatgtttatagcagcacaattcatgattgcaaaaatatggaaccaactcaaatgcccatcattcaatgagtggataaagaaattgtgatatatatatatatatatatatcacaattatatatatatataatatacatattacaattatatatataatgtatattatatgaattatatatatatatatacacacacaccatggaatactactcagccataaaaaggaacaaaatcatggcattcacggcaatctgggtggaattggagaccattatcctaagtgaagtaactcaggaatagaaaaccaaacatcatatgttctcactcatacgtgcgagctaagctatgaggatgcaaaggcgtaagaatgacacaatggactttggggacttgggggaaaggggagagaggggtgaaggataaaagactaccattgggtacagagtacactactcaggtgatggatgcacgaaaatctcagaagtcaccactaaaaaacttattcatgtaaccaaatgccacccattccccaaaaacctattggaattttaaaaaagagaaaaaacactaaaatatatatcatgcaaatataaaaagaaagcagcagcaaggtcaactggataaggcctccaccatcagggagctaaggtgctcagagttcaatgttcggtgacaggttccaaatagtaaaaattagagaccctgaatcagagaccctgggtctaaatttgcatgttcatctcatttgagtgtttacttttgaggaatgtcctggtgggctcatttcatggcaggcgctcttatgttgggctttgtctccttgtaggtactcttactgtcacttacaggagctgcaggctagaacactcccatcaggattctgtgttgcttctaagggaaaattatggtccctaatcactaacaggtagcacagtcaaaaagtagtcctttaataggctgagcaaatactctatatcttacacttgggactgtaatggtagcacaaagctagggaattccttttcttttccaggtcaacagcaagttttctaggcttcctcaggtatgccctcagagaaccacacgtaaggttttgaaatcctatttaattctatccccaatacctcttgctttatattgtctattctgctgtaagtcatataggcaacactcagagtattttttaaaaatcatcatcatgaatgtgattagaagcatttcctcaatagtctctataaatatatcaaataaaataaatattccctaagatataactgaggtggcagcttggcacttttttttcttttgtaccctacatctttcctaatgaaaatgacctggtttccttctccttttccctatttcaatttccaattttggtcagatctgagggtactgggttgctctatcttaaagtcaggtcttattttcttagtttaaatgaattatgttaagtttgttcagagttggtaaataatgcctctctccatttacacccctttaatattagaacttaataaaaaatattaaccagggtataaaacatctcattttccagtaacatttcaggagggaggcagagatggggagagataaatattggagacagtatgtttctgaattacatacagaagaaaatgaatttaaaagtcttagaataccatttttagttcttttttttttttttttttttttgagacggagtctcgctctgtcgcccaggctggagtgcagtggcgcgatctcggctcactgcaagctccgcctcccgggttcacgccattctcctgcctcagcctcccaagtagctgggactacaggcgcccgccactacgcccggctaattttttgtatttttagtagagacggggtttcaccgttttagccaggatggtctcgatctcctgacctcgtgatccgcccgcctcggcctcccaaagtgctgggattacaggcgtgaaccaccgcgcccggcccatttttagttcttgagacaattataatttacaatttaaactctttgacactagtggcattttctaccctcagtaaggaagttaaatggcaaagcagttaactgtaagtttgggagtttaaagcagttattatattaatagttgatctaagattatgggtattttatgattgatagtagctcttggaataaataaaaactgatctattatccaagtccatgaatttctgctcagcacagatagtataagagggtttccaatggctagaacaaaacagtgaaggttttgttgggttttcttcttgactttctgtctgatgttgtgtttgtatgaggatgatttcaggtttgtggcatgttttgacatctttacatggaatatttcaaatacatgaaattgaatgaggtgatgagtccactgtattcaggaaagtagattagagaggtgctcttggttaaatccatgaaagatgcttctgagaggcccttgaactagtggttaccacctctttacctgtagttcaattgcatgaacaccattctggaaaaatttccctgttgccatgagccatgtttgagcatattcaaaataataacacatatttatgaatatgttcttaaaaaattaaagacaataataaaattacagagccattaaaaataaaagcaatgttttcaatttgtagtctgacctgtgtcactataaaagtggtttcttagctgtgattgttatctgggagcctcttgacatgctattgtgattttattccaaccagggcaaaacgtgtcatggagagccgttgcttggatataatgattggcacattagattcactgctcaaatgtgtctgtggcctcagtaaacattgttaactgactgaaaatgtatttcatgctttatgagatacaaaactgagtggtaaaaataagaaagtgcacgtttctgtcttaagaaaagaaagtaattagtaaatagagatattaatcagaataatgaatgctgttgaagaaatatgtttatgactgtctctattccctaattttcagaatgtttatttttctataagattctaccagatatgttggcggttgtgaaactggaaagctttttagttacttccatttactgacttttttttagagtaaataggggaaaatcccttttccattaaaatctttcaagccacagtgagaataaggattgtttgaagcaacagcagcttagtctttgctgaggtgctttaaaaacactgttagaataatataccttccagaggcatctgatcttgctctaataggcttgatgtttctatctgtctgtagctgtcagaaaaatgaaagccaaatacttaaaaattaatatctcagaacacagatatcccagaagttctcaggtaaattgtatggctttatccaccatactaacaatttcaggttgtttcacttttgcattaatggtaggcttttcaggtttatatttaatgggcttgggtattgagttaggaatgcccggcccacctgcagacaaggcagccccttgcctgcctgataatgcacggggaccgagacccataccctcatcaggagcaaccagagcctccaagccaaggggcctgcattctcccaagtcaggagcccgagcttacttttggcaaccttggagcttgtactgtagggttacttctcaggccagaaatttgcatcaaaggactaagaaaaatatatccaaaaataaacatgaaagccaagacttcatgccaggaactccagccacacacatcctgttggctggttctcttgtctctctcctcacagttctgattcttttaaaccaagcggaagcctgcttcgatgacttggacttatgtctgcaccagggtctcattcctgtgtcttcaagcttttccatggagtggcaaaatgattcaaatccagaaaggaagggagtgaagttattaggagctaactaaagttaaaaaaaaaaaaaaaaaaaaaaaaggaagtgttttcttattgccttagactgcctgagctttcctggagaaccatcagcaccagtttcctttctgtggactgagagccactcagtagtagacacgaacagggaatgaacggcaatgaaggtacattttgctgatcaaataaaggatagatgctcactggatgtctgagaactttgagagaccgaaaaagaaggacgtatgctctacaaggtcagaatgaatctttttattttttagtgaagggtgggagagtggggaaatactacatgttactgtttgcattttggaattatgctcaaaaacatctctggcttttctaattatgttccaccagacccaaatatgtaccatggcagggacataatttgatttcatctttgtttgtggtgtgtgtggggccagggggtgagtggtggctcatctttctgctagtgaagcatgtttatttagcctgatgatcttaaatatgtttctagaagataaataaaagtagttgttcataactaggcagagtaacatttatcacagtgaaattacatacatgtatttttctagtgacatatttgaatgtcacatattaaaaatgaattttgttcaaggaaacagattgtgggtgatggtatttcaccctccaggcccctggaaggtattttgcctgtagctctcagactcaatgaagtccttgctgtttataggcattctgttacattattgataactaagagttctacctgctccccaagcagtgatttcagtgtttctcagaagatgatcaggggtctgagcagatcaaggcttggctggcaaatgccaggaatgcccagatgctgtatggtgggcctgccggtagggtactataaccagtagttgctttctctgagctggcgctactttgggtgttcatttcgggagtgtagagtgaatactcaggtctttgaggagctgctgttaaactagtttccgaaatgcttcccttggccgtgcactagccaggactctgttgacacctcacccccactctctcccctgcactgttctcttacactgggtctcctcacccactcagctaagctactgagcagcctgcccttctcaatagctgctcacctcaacagaattgatgccacgttaaacatttcatctctaagaagcttctgtcacattcagcaaacatacttgtttcccaccaggtggaggtgcaaaatgccctctgtctgcttttctgtggtttacaatctagtggaaaagacaatcatagacacaaatatgagacaaactgaaaaaatactctaagaaagatccagcgtgctaaaggacaggggcagagcaagaagagatccgtttccaccaagggcctcgtttcatccaaggacaaagagatctgcttctgaattcttatgtgggtagcaaggctgtttttcagcatccctaaaggattggggacagttaaccaaatgatagcatttgaggcagccttgttccgagggactgagtccacagaaaaggggctgggcttcttcactctgtggttgtgttgtgtggcactctgggttcttctcctttgctgggcccctgggcaggcatggtgagaactcagcctgtcatgtgttgtgattccaaatgtctgggtttgttttttgttgttcagccatcatctggagaaatccgctctggggtttaacgggttcccccaggcaaaggcagttctagttgggaaagctttaagaacttgagactttcagaaggaactcgtggtgaggactgggggatactgttaagcgctttatgtgtagaaagccctgtggtcatgggactttcctgctctcgtggggccaaattccactcctgagtcgtctctgggctgctgtgagaggttagggcacagttactggggcagagggtctgacacacaggatgaagcagcagaaatcctgtcactaagttcgcttctccaaattcctgcagtcttgcccctgtttgatctcactgacctcaatgttttgagctgtctagcccaaaccaataaatgcaagacaaatcttccaaaggttgttgatgtggttgaatggtctggcctgagattctggtctattcttggtttaacccaactttgctggatgacattttgcaaagctctccagcttcctaggccacttattgtaaaatagagatacctttacttaaatcctgccttgctgacaggagtggtcacagttaatgttgattgattcttatgtgccttatgagttaaaaaatctagtgtccccctccctttttggtttgcaaattaaagaagggagagccacaaattctgtgaatggaaagaataaaatatagggcagtagttcatattgtatcaaaatatattatttggaagggaagaagaactttttggtaactttcatcatttgtagttgtagttcttaaaactggtttcacgttagaagtatctgggaagctttttaaaagatttccatgccgggacttttgatagactgatgaagccaaaatctctagaagatagagcttcatcagtagcttctgaaagctcctcagatgagtctctggacagccagggctgagaaccccttcagcagtgggttttggtaattcaccattcccctttgtgcttacttctgcatacacctggctggtgtccttgccctgtgctgagatgctatgattgaataatgtttgttccttacaagtctgtgttgaatttcctagtgtagtttgtccttctcttctatagacattctacttccaagttagagtttctagcagatttatgtaataatggcagtcagtactttagagtcagaatctgtggggtttgttcaaggctgtatgatttagaggttgcctatgtggaatggttattggaagagtgagaataaggtgcaagatcatccccaaattccaccatcccacaaatgcaccttctcttaacagtctgagcaatggtgtctttcacaatttgtagctcctgggaaatttcactgtatgcctatgagagaatgcgagtaaagaagacaggtaataattttactgttactgtgaatgaagttctgaattcttggatcccctaggaatcgtgggaggctctcaactatccccagactatactgtaagaattacttacctacaataaattcccaggaaaagaatcactagtttgaagaatgtgaaaacttatgactcttgataaatatgatcacatttattttcagtagcttttattctgccaccaacagtatttgagcatgcctattgcttctggccttggccatcgtgaccattatatatacagatgctcctcgacttatgatggggatgcacctagataaacccattgtaagttgaaaataccatgtcagtaatgcatttaatacacctaagctactgaacaccatagcttagcctatcccaccttaaatgtgctcagaacacttacattagcctacagttggccaaatcatctaacacaaagcctattttataataaagtgttgaatatctcatataattcattgaatactgtactaaaagtgaaaaccagaatggttgtatggctacttgaagtatagtttctactgaatgcttattgcttttgcaccattgtaaatttgaacaattctaagttgacccatcataagttagtgactggctctatgtgtgtccaatataacaggcattgctattgcaattgtgtttctgtgattactgggatgcttgaggttttattatctcttttttttactgattataaatacccaatgtaacatatcctcttttgggacatgttattcatatgagttaaatacattggcatttatttaccaatttatgtgaatgctttatatgattgagacattaaccctcttagaatttctgcaaatatttaatcttgatctgtttacttttcatgtttcataatatttaaagtacataccttttaaattcattaaatccaccataaacctggctatattcatgattaaaaaaattaaaattagttttataaagatattatcttaccttcatttatagtggatttggaaaataacatgatgtaagtaataatgtgttttacccaatggtgttggctgcatgaattgattgaagttttaaaaattttttgtcgcttctctcatttgcttcaaaaatttattaaatattcttacaaatccatatcttgcctctaattgtttcctatagcctctgtgtaaaccttattttatgatctgtaacaaaattttgtgaagatttcttttctggatatttgcaccatgatctatggtcatcccttccactcctctagccgttgggtgtctgtgaagatcccagcgatttgactgtggaaggctctggtcccttgctttcttttgcctccatgccatgccctcccacaaacatgctttaagctttggtctgagtgaaaccatccagtagaattgtgatcttttctgaggttagagaagcgagttctctttttttgtgtgcatccatatctgccttctcttttccactgtccaatactgtgtctacctctttaatagttgtggagaaagtactgaaactcttaccaataagttttaatgaaacagtttttcatttttaggcctttgctatttgttatgggttttagtttatctgtttggagggtgttttttgcctatgcttagctttgtttaaagtttatagaattgccaaatgcaaatattctaaaaaaggaaaaaagctctataataactttcactatatacaattcctattaaaagcacatagaacttaaaaatgggataagatagtaaaatgatcagatattgtatttagtagagatacacctgttcccagggacatacaccactttgtgaacaacaccttgaaaggcattcacttatttaaaaagttataaagctgggctcggtgactcatgcctgtaatcccagcactttgggagggtgatgcgagcagatttcttgagcctaggagtttgagatcagcctggacaacatggtgaaacccagtctctacaagaaacacacacaaaaaatgagcccagtgtggtagcatgtgcctgtagccatgggaggctgaggtgggaggatcacgtaagccctgggagcttgaggctgcagtgagccatgatcatgccactgcactccagcctgggtgacagagcaagaccctttctcaaaaaaaaaaagaaaagtatgaagttttaaaatagtgttttaaatgttagtgttttagttctcttaaaactgtgctgctagtcacactctctccatccacattttctttccttcctcaccaaaaagtttcatcatacatagcaaattgtaccttattaataaagtgatcattactaaatgaaaattaataaattaaaagccttcggtgaattcctgataataacagttgcaagcacatgtataatactctaaacagctgagtcccggctctgttaatccatttttagagacattaatatattttagcacagttgggaatccatctcccctgaattccctttcttgttttctgcttgttactctatatttccttctcccttatccaagtcccttctccagacctcacctaggtctgaaacatctgactttacccttcagtatttcaggttcgctttctctctgcctctccttgtcctagttggcctcctgttataatcagtcatataacctcttcctttacattaacctcttccttttcaattccatcccaccattctcagtgacctcccttctctgtcctcaagcctcagcagcataagtgaggcagtacagagcttaaagaccatggactggaattgaccaggacatagtgacagtcctggccttgcttcttgccagttctgtgtcctcaggcaaggtacataatatccctaaatctcttccctcatttgtcaaatgggggtcaaaataaccgtaccataaatggttgctgagaggaagaaatgatataatgtaatcaaccccctagctctaagaacaaacccagtagatgtgggtggtgatgatgattggatgcatagacagagcaggggttcaaatccctcactccaggtgctcagacatctaactcagctctcgctgctgcccaaggattaaggttcaaactagctgccctggcatgctcagctttctaaatctgcccttacatccttttctagttgtagtgcctctattaattgatgcacacttttttttttaattaacctcagtcatatctgcaagcattagtcaagcattcactaaatgccagttacgatgctaggcactggggttgcagaaatgaacaacttgtggccgtcaaggatcttgcaacttaatggagataaatataagaaaataaatattaaagtgagataaaagatacaacaggggtgcatacaggagctagaggtggaaggaatagagaaagtaattgccaaggagagtgaaaagggtttccagaccaagtccctcactccatgggcgtcgcattcgtaaggccgacagaaatgtgacagacaggaagatgccaccagacccaggcaaagtatacaagtctttctgatgtgacatatcttcacacagaggaggggtcataacagcccctcagtgtgagggacaatcttctctcatcctcaggctctccctgtggaaggagaagccctttggagcctcctggcctttcttgaggacagaacagggttttgacatccttcagctcctccttgacccatctcacagctcctagctgtgtgcttgcttgctctcttggtgcagaaacacataagacacccagacatgttaaccaagagaactgaaggtcaaactcttggtgaaagtcttgctaggggtagcagactccaacttcaggcccactaactactgctcctgcctgggtcttcctggtctctttgctgaaggggccctttgcctacagtcaccttccttctctacctaccccaagacccagttcaaatgctgtctcctcccatgtcttcaagacaacgcctcccagttcaggcaaatcacatcaggagggaatcatggcagcccgttcacacatttgttacctctcagcagtttatttttaaaatcagatctttctgtgaaggaaaggctgcaaggaggctgagtttcctcctgaggagatgacgatccagatgatcaaagagaaagtgactctaggaaagacaggttggtgttgaacctgagatcagctcagggaacagggatcaggagcacaacatctccaattgctgatttagggaaagtggaggccagagtgctgcggcccctccaagagacctgggctacgaaggcctggggctgagaggccctggagcaagaggccgtatgttgcttcaaaactgatccagtgggaactagacacactcaggagatccatttagtttctcctggactagaggcctgcaggtctttctcagtcagtgcctcccactttcagcaggagttctgctgatactggcgtggcaagagctcaccttggctgtcaggccggggttcttgagtagcagaaagcctaaacactccatatcactctttttcatgtgtgtgttaccctggcacttggagaagtcttctctgacctcatgcagaaggaaggtgagcccctgagctcatccatgtgaggcatccccggtatgaactggctgagggccagatctgattcgaaaacatcgtggtcacttggattttacatttgcaaggcgggtctctgtatgtgaataatacgtaagtaatgataacagatgaattttagtgaccaccaactaagtgccagaaactattcttatctttttatgtagattgactctttagtggtaaattattatcagcttagtctgaagaagataatttaagtatcaagaattcagtgatgggagcttttggaatgaaaagagctctaagtttgtttaggaaaaatgtaggattaggtcgaatgtgagccttttgccttttagtaatataataactcatttatatatatatattatatataatataataactcatttagtcctctggcaggtaggtctgcgtttggagggtcagcaaagagggatgattcacaacaggtgctttttacctgggattcttgagccctgaggagttcaaggaccagctttgacatttttatatgcgtgtgcatttttatattccatatatattccatatataatacatatattaatggatgcacacatataaattatgattaacatattatcagctttcattctaattggataggggtctgttatctaccaaaagattaagaaccattttctgtggaattaaaagaatatagaccagattatgtagcttatttcttctttatgtgggagaacatttattcccagtgtaacatatctttgtagaatttgtgatggtgagagtggaaatggaaaagtacttgtcatcaagctttaaggctttgactctttttgcagtgaagaagaaattattagggaaaaatgctaagttccagagatcaaaacagaaatactttgccgaaagagtatttcaaagcccatttcaaaataaatatttctaatttgttgattcattgcccttttaaatagctgacatcatttggacattttgtacctagttccaaactgattgagctaccgcaggagtttttcacagatgtgtggttttgtatcctcagttccatatctccccaaaactgtccacatttaaaaatgcctgtaaagctaactggacaacttcagatgatgatactttcaaaaagtagtcataacacaacccatcacgcaaaacaagaatcctgtttgtttgtttatttattcatttgagacagagtctctctctgtcacccaggctgtagtgcagtggtgcaatcacggctcgctgtagtcttgacctcctgggctctaaagatcctcccaccttagcctcctgtgtagccagggctataggcacgtgccaccacacctggttaatttgttgttgttattatttttattttaaagaaattatttaatttattgaaactaggtaatacatacatgtggtacaaaattccaaaagtacaacagggtatatattgaaaagtatgcttctcaccctcccctgccccaaccaccagatctcttcaccagaagcaaccactgttatgggtttctctgtagaatattttatgaagaatattctctttaataggttgctgggcaagacttccaaaatgtacatttgactcctcttctcaacctcctgaaaaagaaaaatcaatttttaaaattactgaaactgtcaaggcattttgagtcaaaattttcacacaaattgactctaacatacctaccagagttttcatttacttgttccatttatttgattatttcactaaactccaacaccttgaacccctattagcaccgtctgatgttttaaatctgagaatattttcacaaaatgtgactgtttcagatagaaaactttttttttttttttttttgagacagagttttgctcttgttgcccaatctggagtgcagtggcgcaatcttggctcactgcaacctttgcctcccgggttcaagcaattctcccgcctcagcctcctgagtagctgggattacaggtgcctgccaccatgcccggctaatttttgtatgtttagtagagatggagtttcaccatgttggccaggttggtctcgaacccctgatctcaggtgatccacccacctcagctgcccaaagtgttggaattacaggcgtgagccaccgtgcctggcccagatagaaaactttaagtatgtaagaatcattgcagtataatcatattgaatttttagttattaagaactaatacatttgttggaaatttgaagtaatgcatatggttaataatattaaaagcaaaagaggttacctccttcaattttaatagagatgttagtctctattaagactatgggatatcaaattggtaccatgctagtaaatgccacaagagaaattctttttctactaattttcgaagacgttatccctgtaaattacctctactgatctacatttcctgagttgatatgtgtgcactcatcaaggcaagcatcccttgtggggtagatgaccttgcatccatgtcctttgagagaataaatatttatattgacagtgcagctgccatatattgagttcgtaaaattgggtttgggtgttttaatctggcatattattcttgcttaatttcattgtgctgactatggttacagagctataaatcagggacagtgtttacccacagaaggaaaggagagcaggaataatagtgtgaaatattgcctttgtttattaaaagtgtttcttcatttgggcacctgttgtcttttggttgccggttccctctggatcttaccagtttttgaattttttttagaaattaataaacagatctatgatcgtctgaggtaagaggtagcataaagctcataaagtaaaggagtgagtggggcaggtaaaaagaaacctatttttaatatacaaaaatagggcatatgtatacaaagttcaaacagtacagacaaggctaactacataatttgtggggcccagtgcgaaataaaaatatgggatctcttgttctcctcagaggaaaaaatattaactttttctgtgttctctatctcaactcctcattttgttctttgccatttaatgttctaagtaaagaaaaacccacattttaaattattagcataaatttgtttatctgtggtgcaataccagttttaaatgcaaatataagaccatttaacttacatgcagaatgacccaaactacataatttgaacttcctagctcggacatgtgtatatatttcattcttactagggcagtggaaactttgcacaaaactgattcaactgttttcattttgcttcttgatgcatgcacattctaaccaacactgactatcttcagcttactcacagtaaggaaggactaaaaggaaaaagaagtataggttgccctatctttcctttactttaatgtcattattttcagactaatggttggctaatagaattggctcttggtatccatgggttacacatccatggattcaactaaccccagatttcaaaaaaatatgccagttgggcgcggtggctcacgcctgtgatcccagccaaggtgggcggatcgcctgaggtcaggagttcaagactagcctggccaacatggcgaaacgctgtctttactaaaaacacaaaaattagctgggagtggtaacacacgcctgtaatcccagctactcaggaggctgaggcaggaaaatcacttgaacctgagaggtggaggttgcaatgagccgagatcacgccattgcactccagcctgggcgacagagcgagactccgtctcagaaaaaaaaaaaaaatccaaaaaaggtatggcactgaacatgtacagaggtttgggtttttttttttttttttgtcattattccctaaacaatatgatatggtaactatttacatagtatctgtttgggggaaactaaggggaagaacgcattttatggatgttatacaaaacttaaaatttgataaatattttctagttacactctagaaagtctgaagcaattttcactctccacaacagtgtaggagtatacttgttttttcagttctttaacctgagtaatttcaaactttgaaaatttttattacttcgctttgtatttccctaatcacgcatcttttaaatatttcttggcagttgtactgtttttggtctgtgaatggctggttcacatcttttgttcagtactctattgggttgtatctacagtttatgagattataagaacactttgtaaattaaagaaacgtgccccttttgccatacgcattaaaatatcttttccagggttttgttccagatacattttgtgactaggcgcttaggactgaagaagcatttcctttatgagttttttcctcaagacatttcattcattaatttttttccctgtaatttcttcctgtgaactatgccccagttacacatccctaaggacatacagtatcactattgaagcaaaacttttaaaaaatcattttattgtctactgcttctcctggaaattattttaatttatctgtttgatgtttttatcctttttctactggggagatgctacttcaggaagctaattccaaattagttagttcttggatctgttggctccaagacgcaattcccagcacttattcatccttatctatttgggggaaactcagaggaagaaggcattttgaaattctatcacgtgctgtttttcttggctggatcaatggcttagccattggctgcatggtctctctttctctttacacaccagatactttcaattggagtttctagtagagttgaagctaaagaacactgaatgcaaaaacaaagtaattccacttttgtgcctcaatcttatcatcccagtgctcaatgtattggccttcagtggttctagtaaaatgggatataatcatgtgtggaaaatagcagaggcagcttcaaaaaactcagggaagagagattgaaaggagtgtccaagatggggtacatattataaaggcagaggaagagaactactcttcataaaacttgatttggagataatgctacaattgtggtgactggtgctagtaaacaggaagataaagctacttttctgcatgctctgaaacctctctcaacaagaaataatcccattgtaaataaatttgtttatttgtttataaaatcccaagcaactgcttttttcttcttcttcttcttctaattggaacatttgggatttcaggttttcagattaggggtaaacattctgcaaatattccaaaatctgaaaaaatcagaaatctgaaccaaacaaatgacttttaaccactttgaaaaatgagaacctctacaaaagattgggtttcaataaagggaaatctcttttctacacacattctttctcctttaaacatcgaaatagtcttgaaagaatttttttattaaattctgttctctttctttgatttttttcttaggtgaaatattacattttgttttcctgtggcataatggcaatgtcatccttatcagcttatgctcctattccgtacttcagttgactggcgccctctgaggcttctgagctatgtaggagtttttgccccccactagctgacaccagtacgttacagagttgctctaagttgccagccgtcccttctcactgagatcaaactgctctctttcctctgctcctggtgccttttctctgctaaaggttgggaaatgatatgcgtctaagcaagagtaaatagaccgtgaagaagtgagttgtgagtgctcatagtggtgtcacctagcagctttgatatgtgaaacagatgccacattcattttggtgtcttagaggacagatatgcagttgctaattgtgttcagatcaattaaaggatgtgtataagtggctattggattactggtgtgttgttagtgatttaaatctttataaaacattatttctaaactgttgaccaagctgcaaacatatccaacaatatgcatgctcattaataaatagaagagacagtttctacagtggaaagcacatgggcatggtatcaaaatgaggttttactgctttttggcagtgtgatactggaccagaagtttgtacctcagttttctcacctgtaaagtgagataataaaatatagcttgtgtggtggtggcatgcctagcacatgaataaacactgagtgaaagaatttcattaaatgataacaattttagaaatatataacctgatattaaatatgttttatgaatataaatcattagaatacgttcttgatacttatgataataaaattatttatccttattgatacataccttaaatatatgattatgacttgctaaaaaatatacaattttcaaataacaacaatctcttaaccagtatacatttccaattcagaaatcaaattctcagtggcaagggaagattgagatccagaaagaactaagactagcgagcattccattcctctaaggcttctaaattagaatgtgggtctagggctggaaagagggtgagattgagtatcattcttccaatctctttctggctttttgttcctgactttgaatgagggtgatagttgtaattactccagactttctgaatagaagtgaaaagtgaggtaaatctaacttgttgaaatggaaatataccttccactccataaaagatgtcacatcttggtataatctcaggcttatttttttagatgcaaattagtgaaaaaacaatagctaacaattttggcagccaaaatcttcatggtagcttcctttgaatgccaaaaatctctcatgtatggacacatatgcctgcataaatacatgcaaaacacaccctcttctgcctccacatgtctatggcaatttccaggagaaatgccagaagaagcaaatgcctcaaagactctgtgctttgaggttaaaggtgtgatgcctttggcaccaccagaactcaacttcgttgtagctctgtggtgtgtgacgtctcagttgtgatatcctagagcaacctcatagccctgatctcccattctgtccatgtgattaaacacgctctgtttgggtgttgcctggtagaataataacactgcttaggtaagaagggtattgtcctgaggtgtggcgtccttttgacttcctcccccaaatggagcacttcctgctttccagctgaatgatgagtcatgagaagagacttgaggatgtgacacaggagaccagtcaggccataattatttgtaaggcatgtgtaacaaatctgctttcagcacacatcccatccaggtaaagccaggaaatacaacgagggctggaaatagctcgtggctagcatcctcaacactagtcatttagtgctttcaacaacccaaagtgccacatcaaagtactcatgtttaccagaattctcattgcagatctgaattctgatgattatttctatttttgtgatttctggcaattgagaaacattgttagagtttattcagagtgagagatttgtgaagtgtttgatatatgtctgagatagacctaggtatgtgctataatggcacatagaaatgtggccaggagcacagtcatgtgagaaagctccctgaggtatgtaaggagaatggctcatattgcattttaaattgtgttcttacagaacatgagcattaccatttattactgtgtatgtcaagaaccatgttgggtgtgtgtgtgtatacattttgctgaatcctaactatgggcttttgaggcaattataaacataaaaatagctatatgactaatgcttgctatgggcttgtcattatgctaagtagccatcttatatacattgtcttatttaatcctcctaacaacattggccggtgggggtgattatcccattttataagtaagaaaatggagacttggagagattaaggagcttgcccagggttgtatggctagtaaagtgaaagagttaggatttaaacttgctctgtctgacttcaaaacttgtgatttgtaccacaccatttttctctcttaccatcctatgatcaagcattatcagtgacgaaccagccaaccaacaaaccaaacaaaccaataaacaagtaaataaacaaataaatgcagtttcaaccttctttaatggagtgtatgttataatagaaaggtattctttttctattatctcactctgttgcccaggctggagtgcagtggggtaattgtagctcactgtggtcttgaactcctgggttcaatcccacctcagcctcctgattagctgggactacaggtgtgcaccgccttgcctggctaaatttattttggtggtaatgggatctcactatgttgctcaggctggtctcaaactcccatcctcaagtgatccttccaccttagcctcccaaagtgctgagatcacaggtgtgagccactctgcccagccaagaaaaatgcttatattcacttggagaacaatagctcaaatatggtgtagtattccattctcaccaacacttaggaaaaaatggaaatctacaaccttaagttaaatccaacaaacatgaagtgcctactgtgttggtcatgcttcttatgagactctggggtgaacaatcaagagatactttggaaaagagcaccctcttagaataccagaagaataccagaaggctgaggcaaaagagtaccagaaggctaaggctactgttctcactttagtctctcacattgctacatatcatttcctacaagaagtgacctgttggggggtcttccctttgatatcctaaaaaatgaaacatgtttatttctctgtggatatcatgacgtgaaagaatatcctcctcaaaaatatcttccccattttaacttcagtacacttcatagaaagatcagagtcatggtaatgggccattataccaccatgatcacacacaccagaacacactgggaaatccgcctttgttatccctgcaattaggtttagttctaaagtgattaacttagagaaaatgaagtaagataatattaaataagccagcttttggatatttgatttatgactaaaaggaaaggatccagaagcagctttgaggaaatctcatgcacggtagaaagttaatatctcaaataaatttaaaggctttctaagcatgctggtgattagttcaattgtagatctcttttatcacctagatatgggttttaaaaactattgtaggatctcttggtatggaggagattccagaaaactttgtataaatgtttttggtaaaatttaaagatattgtgtaccccaaatattttctcttctctaggaatttagtttacacatgtgaaaatttatctgaagtgtgatcttacatatacttgatacaccaaacacagtcacaggggaggatgggaggcaaacttgcatgaaacgcgttagagaaaaccaaaacctatttatttgaaccatatgttgttctttactgcacttatttttttcttaagaagcacaaattaatttagctagtttctaagtttgggcaataagcaagttcttcttcccatgcatcctttgatccccatcaccaaacagggaacagctttcttctggtgtaggtctccatgacccctcccctaaaagatcagcaacacactcaggacctccatttatatttttacttttaatgaaataaatacatcgtgaatattaattatggtgagttagaagaaagtgttcagcttccttataaagccaggtcattggctttgttacaggaaaggggtcctgtaggaacgggggtccaagaacgccaagagagggttcttggatctcacacaagaaagaattcagggcgagtctgcagtgcaaagtgaaaacaatgttattaagaaagtaaaggaataaaagaatggctagtccgtagacagagcagccctgagggctgctgtttgcccatatttatggttatttcttaatgatatactaaagaaggggtggattattcatgccttccctttttaggccatatggggtaacttcctgacattgctatggcatttgtatactgtcatggcgctggtgggagtgtaacagtgaggatgcccagaggtcagtctcttcattatttggtattggtgggttttggccagctccttaactgcaacctgttttatcaacaaggcctttatgacctgtattctgtgctgacctcctatctcatcctatgagttagaatgccttaagcatctgggaatgcagcccggtaggtttcagcctccttttacccagttcctatttaagatggagttgttctggtttacatacctctgacagctttatcatcatcttaagctttagggagaagctacctttattcattcatagtatatttactgagtatttagtagtggcacatcattacacaaaggagatacaaaaaaattcctgggcattgggcgtacggaggtactaattcaagaggtaagtcatatgcatatgaaaggcagagtatcaatataaaagttgctaacattaagaggaacatgtatgggtcaagaagtgaaatgatcaatatcatattttctgttctcttaagtgctaaaagcctctttctctttagtactttgtcttgtgtttcatctctaattcaaagcttttataaaatcttacttcctccattgaaacctttgagcatgtgacgaattatggtcagagcatccctgggtccaaattattcattatatggcttctcttccattaaggatctgtgttcgctagctttttgtttgtttatggctctctattcctgtcagagctggtttagaggttctgagccagagtgcagctacttccaaatctttaaagaaacattttcctccaggaaggaaaactgttctcttaactgatcatgcaattctggaaggcgaagaaggagtgagccctgacccaacaggacagattagccagatcaacctggttatcatagcagagtactatgtttccacttcaacatctgcacaacgcctattctacccattgggtgatcaaccacttgttctttggtcctctgtgccattctcttagttgttgatacttttactgtctactttacctgctagagttatttgcagtgttggggcgagctactcagtaacagccaagtcttaggcgactgcatgaaaagttcatcactgctgactgtcacatcgtgagcacccagttaatatttattaaggtagtaattgttagcagttagatatggatttatttaaggtgaatattatacttcttttgtaggaaagaatccaaaagcatcaagtgaagctgccctcttcttccttagcaggtcctttttcagggaaattgtcttgggatgtcttgttagctctaggggtcttagagatcactcattgcctatgaactgaagagcagaaacaggtccagagagctttcaactgtttccctaaggccaccatgctgggcattggcagagccaggaccagccttggttttcctcttactggcccagggctgacgccatagcactatgtctgaatggggcttaaaagctaatgtgataagggaaagccttgaattaacagtgtccaaaactattttgagatcctgatgaaagtgatagaccctctccccagaaaaatgcatgctatggtttggatatagtttgttgggctccacaaagtctcatgttggaatttgatctcactgttggaggtggggcctgtggaaggtgtttggctggtgggggcagatccctcatgaatggctttgtgccactccaagaagtgagtgagttctcgctcttacttccctcaagaactggttcttgaaaagagcctagcacctcctccttccccctttcttcctttcttgccaagtaatcgttatacatttcagctcccctttatcttccgccatgagtgaaggcagccccctcactggaagcagatgttggtgccatgcttcttgtacagccaacagatccatgagccaaacaaacctcttctttataaactacccagcctcaggtattcctttatggcaatacaaacagattgagacaatgcacacacacacttacaattttggatataattttggacatgaacttcatgaagcttatccaatgacagctgtctagggtgcatgacctccattttatgaagtactgatacagatggaatttacaagaaacactctgcctatttctaaatactcctatattctcattacacttgagtaattacaagattatagaatgtggatggttactgccacttctcaaaatggccgtttaggatttaattattagtgagggaacaattccccaaacagacatccaaatctacatgttggctgaataacacacacacacacacacacacacactacacacacactacacacacactacacacacacacgaacataaatttaaaagcagttaaaaggcagttaaaaaacttgaaaagtgtgaatttcctacaactaccttatcttccattgaaaaattatttttattgtccctcattctcctattatattttcttttctagtaaacacctgccatagtgtgtatcctttattcaggacctactgtgcattttactcgggaggctagaaaattattcatccagcaagtatatatagaccatctgttatgtgtaagatattctgagagatgtggggaaagggttcttaagaagacacagcatggtcttttctctcaaggagattttggttcaatttggagggcacaatgatattaatatgcattcaatggcaggtctttattgagtgctattcaagcttcaagctagaaagagagacaaaaattactttgaggtgaacttcatgaaggaggtgaagtctatactgactgggctttgacaggtggattggattgcagaaggccaaaaagaaggggaaggtattttagtctattctagttatctattgttatataacagacaatcccaaatgtagtgccttgaaacaacaacacctcttaattttctcctgaatttgccatttggattgggttgggggatgagacagagaacagcttgcttctgttccactgggcatcacctggggcaacacacaggaggctggcatcacccaaaggatcgctcctggcacatgtgttggttgatgctgacaggagctgtggctgttgaccagagcacctacatatggctgttccatgtgactgcctggcttcctcccagcaagaggcttcatgacaagagccagtgtcccaagagaaccaggcagaagcttcttcaattttatgacctgccttggaagtcattcactgccactttcgtcatagtcacaagtgcacccagatgcaaggggagggaacataggccttgcttttaacatcttcaagtcacactgtaggatgagcatgtgggaggggagatactgttgtggccatttgggaaaacatagtctgccccacaggccgtggaatgataggagtgagattgcagaggtggtgcagttacaggtgtctggataatcatgttgggtggagcttggaaaatgggtgggagtctaagctaaggaatctggatttagtcctgctgacactggtgatgctttcaagtttttgatgtaatcacagtgatgatgaactagaatgatctggttggagtgtgcaggatcgttggaggtggtgtcattaactgggagtttattacagtagtctagatatgccaagataaggccttgcatggagtacaaatagagactggaaaaaagtgacaggaaagagagaaattaccaggaataatacgatgttcaaaatacttggataagaggaaaaggggaaaataggacagtgataatgtcactgttatgagctaagtaaaaatataggctctatccttaaagagatgggcagtagttttccaacagaatttgccgggggcaagtcaaagcatgcacacttggataattagtgtttcctgagctcccacagtgagttctgaacagataaaggacataattgatttaagtgcatttacaaaattaagattttcttcaaaatgtaattatatagttattttattttgcctttagagtagtcctttgggatattactacaagcctcacagtcccttactaccactttgaaacctaaactgtttcaaaagatgaaaagttcttgtgagctcttttgtcagcaaaacctgacctgaacaggtattgaatagacataaagctgtttatagtctctattcatcccacttagtgtgaatattcatgtatttcattgcatacatattatgtatttgattttgagatctagatctgagtcataatttcatggatgagaatagcgttacttggaaaattaagtagtttacccaaggcgtacgctaggatctgttatctgtaaagaccaatctgtaaaggccttctcagtgagcaccaactccatctgaaaagctgtacacaggaattgttcacagaagtagatctgtttctgacaccagttctttttctggttggctatcttatctctgacaggtgctggtatttttgccgttaaattgcaaatcctttgaaggcagaaacagtgttatttgctttacatagaagcagtttacataaagaagaagctgaatatttgatttggcatttgcaattgacatataagtactccacattaggctgtattttacgggttgatcagtatacactgccaggtaagtctgtgtactctgtccgtgtccagacttggggacttggaacaagcacaatctcccaagggcagaatggtcatggcctcaccctgtcctctcttggaaacctcatctcgatgtgctgagctggacctgtgagactttgggcagagactttgggcagagtccagggttaagcctcttcggcctctggtggctttcaggtgccacttgggagaatgggccctggaaagtgaggcactcgggaaataaaaatgtacttccatcttgggcttttctcctgtgcaggcaggctctgcttttcaggagagaaaatgacttcaggacctcttgcatcctctcatttgcctccttcctctcctccttacagtgaatgggctgtatactctcaagcatgagattcaattacttttattgttagacttggctgtgattgtctttaatggtcagaaaattatccagcaactaaaaaaacacaattaaaaaagtcagccacagtgtgtccctgtgatttttggctggcagtaaagaagaatttcctcagaggacttctttgagacatttgacattttgtacttgttctccaaattttatttcacaaatggaaacctaaggcctgtgtttttgtttttgtttttagttcattcaatagcagacatattgtaagccactcaaaagtgatagtttcagtttaatgtcatctacgatgtggaaaatattttatagctgataatcctaactttcaacgtacaacattgagcaaatatgtatatgaatgcaaagcatgttcagaccctggttcctgcccctaaataaattggtatccttgggcaacttactatatacaaatggaatccatcttcttattgggaagaaggaaagagaattttagcccacattacagattttctgatgggaatagtaatacaaatggtattgatgaaaagaagtactccaggaagtgtcactgactgtagtgacctagggcatttgcaatagggatcatgtggaagtgatttcaggccaagctggaggttctttgagttatgtggggacagggagtccttgagcttcatggacctatagtatttctgcctgagcagcaagtgtttcataatatgccatggctaaccacattacaggagaagtcatcgcctcttatgctttcagggagccaggaagcaacgcctaatgagatgcctgacagttcagggaatggccctgcatgtgttgttttgaatgatgccagccagtttcaagtgggcaggattaaaatgcaaaccaaacccagattttttttttgtatttaattaatgtctgatgtttgccaaccaaggggaaggtgatagaaggcagcaaaaaaattgcttagagctgtgctgtcacctggactaagacatcctgacatgatgtagctgggacagcagctggcccctctgtggtactggggaatggaattggcagatggaaaggaaatgtgaaaatgttcctgaagcatggcctatttacaagtagacttttaataaaaaattgtggttaagatgcacataacgtgacatttaccattttaaccattttagatatacaattcagtggcattaagttcattcgcaatgtggtgcaaccatcactactgtctagtttcagaagtttttcatcaccccattaaggaaaacttacacccattagcagtcactccctatttctcacttctccagtccctgccaattcatctggttcctgtctgtaagtaggcttttcaggacagcacagtagctcaggggaatggaagacactggggttgggaattaagagacggagggtcttttcaaatctaggctcctgtctttgttgttttcaacaacatagcaaaccctcctcaccgcagcaggaggacaaacctgtagcttatgactccctttgcaaatctttttaaaccaccttattgaggtgtactttatatatcataaacttcatgcatttcaaatgtaattcaatgatttttagtatctttaccagatggtgtaaccactgtcataatctagttttagagcagttttatccttccaatcagatctctcatgcctatttatagttaatcctgttctaccctcagtcccaagcaaccagtggcctactttcagtctctatcaattagccttttctggacatttcatagaagtgaaatcatatgacatgtcgtcttgcatctggctcctttccctgagcataaggttttggggattcatccatgatggagcatgtgtcaggagttctttttaaaaattgctgaatagtatttcattgactggatataccacattttatctattcacctgcaaacatttttaaaggagtttctagtctgtgaagtctagggggttgggttaattaggtgacttctaagatcttccctctcccagattctggccaaaaaaaagtcccagtggcagatctcagttcttagatcgtgcatttactcaacagatgtttgttgaatagccctcatggtgaaccacgctctgtgctagacactgggaatatggtcctgcattcttgagatttccgctttactgtaggagacagagcacttctcacacaaggcccggcccagcccctatgctggtgggtcacaggagcagacacattctgttgggactgatgtttggtcacaggcaggtttttcagtctgctcccctgactatgcccctccacagatgctctgtgctcctcccaggcactgccattccatcatgagtttccagcacgtgtttttggaattgcctgtttgcatgtctctcctccctttggaatgtgagcaacctgaggatggaatggagcttagtacagtgcctggcgtgtagaaggtgcccagtggttgtttgatgaattaatggatgattgaataccattctggcaagaatcaggagcaaatataagaattggggacatacgggcctcttctggtctcttcgtttctaggggcagtgttcttccttctctagttccagagttagcggttgcagggttgcctctttagactgcaggcacaggtacagaagagaaaatacagcaatctgaagttgtcactgcttcctggaacacaagcttgacacagacttcttaacactgtcacaaatatcttaatagtgctcctagggtcaccctgagagcagactatttagggaaacaatatgaaaatggtcttgcgtggcagggtgactgtacccagatgccagagatggtgacagcatggcttccccagcctgtgctcaggctcctcccgttccaccctgccaccacctggctcatgctctcagcctcctccttggctcctgccctgggacatctcacctgaccagaaagccgggactgaaggggacaggacgcatcgtgtgtattcctgtgggacactgggctgaaggtggaagtgggaagaccctgaatgctgaagcaggcaaggtgtttcatgtggagaagaaagcaggtggttctttgagggctttattggtggccagtactggtggctggagtctaatcagagtcccattaccttattgggacaaaacatgtaaaagggcagggacgtagtttagttccagggattacgtgaaacttttaagagactataattatttttaagattatttattctgaaggtgtaatctactttaataggaccatgtgttagccttgtcatcttgggacaactctggtggtctttctcatgtttattttcatggttattgattggggcccatggatgtggtccatcatacacaattatttcatgagtggtggtcatatcatactctgttgacattctactagggatctccacatctcccaactccttacagaaggactcttaatctctggggcgggcagtagctttctgggttccttttcataatggaagacaaagattgagagtctagttggaaagaaactaccttgggttttagttgattttgttattgattagcaattttaccacttaaaatgtactcatgcttgagacaccccaaatatgttctatacattctaaactcacgcgcagggcacttctccctgagccagtgtccaatgacagtgcagtgacacctggttctaatcttgtgaatcaaaagtcaaggtatacattcttcccccgccagccccttcttgacgctttgcctgttaattcacactagatcccttctgttgagctggtagtttcatttttagtatagaaattaagtttaattaaaatttacttgccatttaaaatgataatttgtttggtttagcatccttaattaccttgagtaaattgcctgtagaggctcacataattcgtttgtttgttcaaagtgttactgtgtcatctgcatattttgaaagataccactttaatgaaacactggggtggagtcagggcaaatgctaaggggatggtctttgctaagggggtggtctttccgccctagtctgtttgttcagctggaagatttttatcatcttacagagttttcacaaaagatcaaagttttacaaagcttcagtgttagaaaatcattagcaaggaagtatctgggggaggggtgggaatatagcatgtgtgaacagccttcgagtccagcaagaggcctgcctctcagcacccacttcagcttcttataaggaatgcaggtaccaagatatcttcctgcaaattcaagggtgtatgtaattgaatcatatttctaatgcatcagaggagcttacaataagttagaaggctcaattagtgaaaaaaaaggtgatgttgactaaaggagaccatttttataattctgagtgtattataaccattaatcagtgttaataaataaccatctatagcagagggctttagaaaacttacattgataaatagataagaataatggctgttctctgggagcttttcttttttttttttttagcagagaggtatgagggatttctttatggtctggacaagtttgccagacaacttgattcagtcagtctctgatttattgattttatgtaattccagagcttaatcattggtttactgccaaaaccttagaaactgatttatagttctcactataaaaaacaatatgacagaacataatagaacacattgcattagtttaaatatctccagctttcctatttcctataaacaaaatgcagaaaacattctaataagagccctttattagtgttagttacatactaaaagcatctctgaatgatgtggccagaaggcaaatctcaaatagggaaaattctctcttttttctcagggattgtttgtagagaaagtgtatatcatatggaatatcagtaatgaaagtaaaagaataacagagccagttttttatgtttgcactacaatttggggcagtatgagaaagtcaggaagattgctctcttcagggccttgtttagcctgcatcctaatttactatctttgtacacgaaggcacagccactggtccaacattattaataggacatgcccttttctgtcctttctcagtcataatggaaaagacactatcttgatgcttgggagacctgcttagaccactaagatctcttagtgactgtgcgcccttgggcaagttgcttcatttttctggactccagtttccttacctgaaaattgcttgtctgtagatgaattaaacattatctaaggttattcttactaaaatgctgtgctttcaatggtgatggattgtccttggtccatgtgcctctctactggtctccatggatccacagataggagttggggaaaccagttcctggagtcatggtgcagtcagaaggcaagagttagaagtaagcagacaggctcacaggggaatcaagacctttgccctcttcgtgctctcagttttgatgagcctgtgtagctaaggatagactgaccctttaatttgacctgacccatgttttcttctatttcctacttggagtggagggcgtggggatgctgagaatcttaaagataaaagcatctggaatatgatcttgatgtctaaaataaaaatttacctttgtttaaaggaaacaaaggaaaaattcttttcatcttatttgactcagaaaaaaaatcattacttttaaatgtcaatttttttgctttagttaggtttgtaacatttttaaattaaaaagtaaaaatatcaggccaggcgtggtggctcatgcctgtaatcctagcacttcgggaggccgaggtgggtggatcacaaggtcaggagatcaagaccaccctggctaacacggtgaaaccccatctctactaaaaatattaaaaaattagccgggcatggtggcgggcacctatagtcccagctacttggcaggctgaggcaggagaatggcatgaacccgggaggcggagcttgcagtgagccaagatcatgccactgcactccagcctgggccacagagcgagactctgtctcaaaaaaaaaaaaattaacagatattatttaaaatgcaagtaaattttatataaagtaaagaaaaattttctccactcccactagccagaactatctactattaacacttttgtctgtgtacttccagacatttttctatggacacatcaatgtaattattatgtacgtacctcttttgttgctttaaaaattgaattatttggatcttctctctttttttccttattggtctaactagcagtctatctatcttattaattctttcaaagaaccaatttctggtttcagggatcttttgtatggttttttgcatctcattttcattcagttcagccctgattttggttatttcttgtcttatgctagctttggggttggttcactcttgcttttctagttccttaaggtgtggtgttaggttgttaatctgagatctttctaacattttgttacgagtgtttagcactataaactttcctcttaacacagctttagctgtgtcctagagattctggtatgttgtatctttgttctcgatagtgtcaaagaatttcttgacttctgctttaatttcattgtttactcaaaactcattcagaagcgggttaatttccatgtaattttatggttttgagtgatcttcttggtattgatttctattgttattgcactgtggtctaagagtgtggttggtatgatttgtttttttgagtttgctaagcattgttttatggccgattgtgtggtcaattttagagtatatgccacgtgcagatgagaagaatgtaagttctgttgttttggggtggagagttctgtagctgtccgttaggcctatttggtcaagtatcgagcgactataaagacacatgcacatgtatgttcatcgcagcactattcacaatagcaaagacatggaatcaacttaaatgcccatcaaagatagactggaaaaagaaaatgtggtacatatacaccatggaatactacacagccataaaaaagaatgagatagtgttctttgcagcaacatggttggaactggaggtcattatcctaagtgaactaacacaggaacagaaaaccaaacactgccatgttctcacttataagtgggagctaaacaatgagaacacatggacacaaagaagggaacaatagacaccagggcctacttaaaggtggagggtaggagggtggcaagaaggtgaagattaaaaaagtacctgtcgggtaccatgcttattacctgagtgatgaaataatatatacatcaaactcccgagacttgcaatttatctatagaacaaacttgtacatgtacccctgaaactaaaataaaagtttttaaaaattgaattatgctgtaaatacgattatgcaaactgactttttacttcaatgtctttcatggatattttgccatgaatatttatagatcacaacaagttatgtgctcattaaaaataactcctggatttgtttgtgtaactgtatagacatattagatcatatatgaaagcagtaactctgcagacagtgtcaccacattgtagcacatttcatctttctattttaggaatgtcagtgaggactggtcatattctaggcatctagtgttactttccctgaacgttttcataacatgagccccaggatgaagataaccttccttattctttcaggttatcttccttaaggcttcttaagctaatgaattgtcaattttgatgaattgtcaataagttgatccgaaacgtaacccttctcagattttatatttagatttgtttaactttacttaactcttatatagtgcttacttgtatcaggtagagttttaaacacatcaaatttaaactcatttaatccttctaacaactatatgaggtaggtattactagtgttaccctgtttcaacttccttgtgattcttctatacaaaaaatcatgttatgtgccaataatgggaatcttacttctttctttctaatctttatgcctctgacttatttttcctgccttatcacactggcaaggaccaccagcacaggggtgaatagaagtggtgataatggacatcctttccttgtcattgatcttaggggaaaatcattcaatatttcatcattaaatattatttttaactgtatattaaagacatatctttttatttttaatttgatgagagtttttttaaaaatcacacattgatattaaatgttgtcaaatgctgtttctgaacatattagtaagagccacatgtttgttctcttttattctagtgatatggtgcattacatgggttgattttttaatgttaaaacagtgttacattcctgaaataaactctacttgttatgtaaaaactctattatgtaaaaagaatgattgtcctttttattgatatatattgctagctttgatttgctgatatttgctgtaattgttaaggatgtttgtgtctatgttcatagcaatttttttcttatagtatttttattagattttggtatcaggattatgctggcttcataaaatggttggggattgtcccatcctccttcattttctgaagaagtcatgtaggattgatattattttttccataaatatttgatagaataccatgaaaccatttgtactagagttttctttatgaggattttgataacacattcaattgctttaatagatatggcactattaaagatttttaatttcatcttgtgtcaattttggtaaattgtattcttgaaggaatttgtctgttttatctaagcattcaaatgtattgacatagagttgtttattatagttatcatcttttcagtgtatcaggatttgcagatacactgcaaagaaccaacttttgtttatttttaatgtttttgttgactttctgttttctatttcattgatttctgacttaaaaaaattccttcgttccttctctttactttgggtttaatttgttctttttttttctagcttctaaagatggaaacttgggtcatcgcttttatacctttcttcctttctactataaacatttaaagctataaatttcctctaagcactgctttgttttctacaaattttgatatgttacattttcattatcattcagttcaaaatactgtgtatttcccctatgatttcttctttggcccatgggttctttagaactgtgttgtcagtttccaaatattttgtttcctacatatcttgttggtattgatttttggtttaattaaattgtggtccgaaaacatattttttaggatttcagtcttttgaaatttgtttagacttatttatagcacactagggttttcgctcagtaccttttaataacttatatttcactgttgagatttctttatatttaccaaggtattcctatcttggtaaatctatcatgcacacttgaaaagaatgtgcattctgcagctgttgggtgtagtattttttaaatgtcaattaggtcaatgtagttggtagtgatgttcaggtcttatatgtccccactgattttttcatcttattctaactattattgagagaacagtattagaatctccaagtatttgtctttttcttcaataatttttttaattttttgctttttaacattttgttattaggcatgtatgcatttattatttttatttcttttaggtgaattaccctttttatcattataaaattcatctcttttgtctggtgatactctattgccttcaaatctaattcataggatattaatatagttactgtggttttcttatgctttctgttttcatggtgtatatttttccaagcttttattttctaactatctgtttctttgtatataaaaggtataaagaacatatagatgaattttgctttttttatccattctgacaatttctgtttttaattggagtgtttagtccatttacatttaatgtagttatttatatgattggatttaggtttaccattttgctatttttgttgttgttgttgttccatatgcttttttattcctctctcttcctttcttgccttattttggattaattaatttttttatagaattctacattagtttggttccctaggaagcagataccaagattgagttataagtacaagagctttattggatgcaaggccaacaaaaatagagaggtgaaagagagagtttgttacctgtgaaaggggcagaaggaatgaggatgaaagagaaagagcctcagactgcagcacagttttgagaatgtctctgcaagcccgatggagagtattaatgcaaaaattgcttgtaaacaagttttgcattgggcagaaatgatggccctccctaccatgcttatcattgactaactttaaagaacatagctttgattcactcacagtagatctaaaaatcactgcagttggatgctgtcagctagctgtactcttcacagctgattggcaagtttcttctagaagggagatccttctagaagtagatcttttacttctagaagtaggcaccttcatggctgccacaaattccattttaatttttccattggcttttcaattgtatctctttgcattaatttttaatggttgctctggggattaccacatctattaacttttcacattccacttagaattcatattgtactgcttcatgtcaaatactgaacctggaaatggtataattccatttattgccctcccaatgctttatgttattgttgatgatattatacctatctgtgttataaactccaaaatacagtgttagaatttttatttcaatggttgcctgtaatacaagtaatatttttaagtaatatttttaaagtatgtgtgtgtctgtctgtttttcatatttccccacatattgacatttccagtgatcttctttccttcctatagatctggctaaccatctggtgtcttttaccttcattctggagagctttcttcaatgtttcaagtaatgcaggtctgctggagattaagtgtcttaggttttgtttttctgaaaatgtcttcattggcctccaatgttgaagaatatttttgttggatatagaattctagcttgacaaatagaattctagcttgacaagtgttgttttcctgttggtattttaatgatgtcattccattatcttctattctctgtgaattttgatggaaagttactactaatatagttttctcctatacatagtatgccattttccccctggttgcttttaagtttctctctttatctttgaattttaatagtttgaatatgatgtgccttggcatgggtctttgttttgttttgttttttattaatctggtttggggttttctgagaatcttgaatttttaagtttatatcgttttttaaccaaattttgggaaatttgaggtattatttctttaaatattttttctgtctattctctgtcttcttgtccttctggaattccagttatacatatgctgttatatcccattgatccctaaggccttcttcattaaaaagaattttctctgttcttcagattggttaatttctattgttctatccttaagttcactgacacattttattattatttttccaatctgttattgggtcaattcagtgaatttttttcagatactgtgttttttagttctagaattttcacttgttactttttaataacttgtacttctctgctgagatttcttttatgtccttgagcacttagttataatagctgctttaaagtctttgttaattctaatatctgaattatctcagagttggtctcttttggttggtttcttttgaggatgggttatttttttgtgtgtctttgcatgtgtagtaattttggaatgtactctggacattgtgagtgatatattatagagattctgaatactgtcatatgcctttaaagagtattgattttctgtttttgtaggcagttaacttggcaaaactcaaattccaatttcatcttccctgagacagcagcagacatctctgttcagttctttctccttaactgagtggcttggagtctgcttcacatatgtatagtactgggatcagtcagagatttggtcagatctcatgtagtcaatctggggctttccctctgtggctgtcttctctctaggatttcctcctttattttctagctgctatcatttccctgaactctgtcctctggtttctcaaccaggaagactacaggcttttatctgactctggccacactgtggaactgactgggccttgtccttagatgaaaagttataaaaattgggtaatttatcaagtgccattcttctaagtgtcagcacccaccccccgcccgcctttatttctgcctgttctcagtcattctccactgccttcagataattttattattgtttttaaatattttatccaggacttataattgttatctgtgggagagctggcctgaattgaattacttttgtgaccagaagcagaactctattatcccactttacaggtgaatttaaaatacgcgcgtgtgcgcgcgcacacacacacacacacacacacacacagagcgagtcttagtactttgcccaaggtcatacagctggtaagtggcagaaccatgatttgaagacaggcaaatccaagtcttaggatttcttccaatgggagcttttaatggtgtgaattttcaggacaatggaaggaagtctacaaaatattctggaacgtatagggccttatggtgtcaattccttatgcaccagactcatcccaagatctcattactcagtggatacttcatatgtctttcggtgtatacattatttgagacgcgagtttatatacaagttgcattcaaggatcatgagctcttggttaactacaaagtagatctttagttatgaaaatccctattttcagagtcctgtgatcttggcttgggccatcttacatagaaactggtgaaataggccaggtgtcatgtccataatcccagccctttgggaggctgaggtgggaggatcacttgagcccaggagtttgagaccagcctgcgaaacatggcaaaaccccatgtgtacaaaaagtacaaaaattagctgggtgtggtggcgtgcctgcagtcccagatacctgggagactgaggtggcgaagatcacttgagccctggagagtctgagactgcagcgagccatgacctacggctgtactccagcctgactgacagagcaagaccctgtctcaaaaaaaaaaaaaaaaaaaaaaaaaaaaaaaaaaaaaaaaaaaaaaaaaaaaaaaaaggaaactggtgaagtttattatgtgattcttttagtgactaaaataaagagaacttttagaggaaggtaatatccacagtaatgtaatgaacatatatgagttatttgttgaaaacactcagaaccacagttatggataaatagtaaacttttaaaaatgtaatttagctgatgtgagtcatgactttcaaagcctaacaacaagaccaggcttgagcaattcttgtttttgagtttatgctccttcttgactgtttccctttttctcatctagcctaagtcagtttgaattaacatttaccaaattattaatttcatcgtattcctcttaccccttgattttatctttatgatgtattttcaaagtctggcttgctctttttgattttgtcatagttcataagctgatttgtagagtagtaaaatcttgttcatgtatgttactttcaaactgaaggagaaggcctgtgtatgtgctcctggaattctctcagcatcccaaaccagtgctcggataccatactccagtgaccggcccataaagagcagggactcaatacttgattgattgatggttctgaatgccagccagtcagttctgggaaggtgggcttatcttcccagtgaaataaaactgagtcattgaaggccatgataaagatttggctttcagcctaagagtaatgggaagctatgcagagttttaagcagccgagtgacaagcccagatttaaatttttaaaataatttatctggatgtttgtggagcagttaagtataaccaagttttagagcacagaaatcaatatatgtttttaaagtttacccaagtgatataatctaagaagaactgataccctgaatagtctctaatcagccctctcaagttatttctcctgactgaaattttgaaaaacgctgagaagcataaagtttgagattgcctttttctgtttttggggggtgcggttggggaagaacctgaaatgtgagtatttagcatttctgatgagacattttattttataatgaaaaattgaagaaatgcagatgtcattaggattagggaaatgaatatataaagctatttaaaatgacaagtctgtattttatgcctacatgaaaatgggtgtgttaaatttgttaattttaataagcaaaatttaaaatgcaataacatgtttaaaattatgaaaatgatcatgtattcccttaacaaaatacacaaaaatagagatgaaacttggtatgctttgttatccatcaaattctgttgcttaacagtggtttaagtcttgctgaataaaatgagaaaataaacctaatattacttcagtaatcattgtaaatctgagtttaaaaagcattgaggtgctgctaaggcagcaacattttcaagatattaaaaactttcatatgaaaatgtactctgatatatttcctcttcccaaacatttgtggaggttgagaagattttaaacatgttttaaagaaaggaattgacagctcatgaattaaatacagcctttagctcctgcttcagctgctgtttgttgatagcaggttgcaacaaggttaataatgatttgtttgatggatctgcccaaatttttatagcattttattctttgtatggaacttgctaagtcatagctcaatatagctcattaaaataaacatttaagcatgtgtatataaaacaaatattggtggaaaaaggaagagatttctcagaaagagtgccctgaaggtaaagtgcaccctgggcagtaaggtgaagtatcaagttgctctgtttttataaatagtgtcgattctgaattctgggctgaaaaactggtaaatgacagctctctctagtatttcctgaggccatctactgttttcgagcataaatcataaatatacctttgaactaagacagtcttgctggacctatccttttgcgactctgacttcctgtctcaatggaatattgaagaggaggctcggtagaataaacagtggaatccttgtccgggagtgactgcctggcaattgtttcatggaaaacagggaggggtgggggacaacaaccctgctctgttcactggctctttaatttagattaccaatgataaagccggggctacggctaaagaaaggtaggatgcatacgcagaaacattagtgctaatatgctgcagaaaagccaagataaatcagtccagctctcatacatcactaagggagaagctgattgcaacttgaccatgttgcctgagtagtcccatcagtgagaagaggagaacatggatttaaaaaaaactagaatgtacccctagggctcctgccgtggtggacctgggagaagtgtctggtgtaagtttcagcttgttttatccatgtatttagcagtgtgttcacatatacagggagcttgtttctcttctctgtgttttcatggaagcctcaagcatgtttatttacagaagtagacttcattttgtgtaaatgtaatatcaacctaataaagttcttaacagagaacagtttaacccagtgtttatccaggagagaaatgtaaaaaaaagtaatggttgtcataactgtctgcaggaagcctgtgcgtgagttttgtttatttgggttttttttttttttttggttttgttttacggggaagtgaagggttagaggagtagatctgaaatgaaaaactcagttatttggcaattgtttttttaaaaaatgtatttgtcacccagcatttcactcctcctgtggtcttttgttttgaaaaactatgtttaaatatgtaaagccagcctgctagaaacgcattatattttatgactgggatgtttgtattgtttcatatctgttattagacaaaataatcataaagggtgttttctatggacctttttatattccaaaattaagtacagatggtaattttcagcagttttaaaaatttgtcaattatttaatttagcatcacttaagcatctgcacaaggagaaagctgagatggtacagaaactgaatgagcattgattgctagtctgaattgcatctttaaagtttttgcctcaaatctctgatttcacagtttatttttaccaaattagattatcatatttcattatcgagactatgaatgggtggaactctctgagatatcctacatttcccgttagaacagggcttaaagcgcctgctgattgttgctctgagggaaattctcatgccggctcaccgagaagattgcttaaataatgcatgggcaagagcgaagcaagatggaatttatggcccagacagtgtgatcaggcttttgttcagaggagacactacttaagtgtgagcatacagcatacactgaggctcaggggaagggtgtaactgaatgaaattagtgaccacatgatgctgtccacatgttatttcaaaacaagccttaaaacagtccattgatcctatagtgtggttagagggagggaaaagggggtatcttgaagtgccagttgcaaatagaatcccctgactgaaaattccatggggcagacacaggaagtgaatgctataccaggaagatggtgtccctggcgagcctaggtgtttgactgatgaaatgtagtatggcagtcttgttaggaaagaataaaccttgaccaaactgcagggttctatacactatgtcttccatcttgtcctaattagaggaatatgtctgctgaatcttaatctgtttaattgttgatagagcaggcatgtgattttctataaatacacatgagcattcatttctgaaataatggctgttgccaaatatattagaccgacaggagtgctggactagggaagctgtgctgaatagttgagttttggaggtaatggaccagttgagaatcactgcacagctgggccagcagctgcacccagtgctctgtcaagtttggcctctaatttccttgaacttgtccttgtttgccaaaatgatgcacgtagcaagaacttgctttaaatgagcccactgccagcaaaaaagacccttttcaaagagtctttgtcgaagtgtgttgtcaacagcggcaatggccaaatgaggtattgattaggcgatgggaagtttgaataatcacaaaaataaaaaccaaagacaaagtggtagaatgaggtaagctggcaggagatcagagtacattaaaaggcagcattcggtcatcactgtcctaactaaaggacatatggaaaaatcccataataatatccagcaataattatcttgtagttaggaaaaaataaattggcccctgcagtttggaaggcagcccagtaatctcagtgccttttttcttaacagtgtattgttctgatattctttgggaccgggtcagaaggaagtgtcagagagagcattttatattaagaagcatcctatgactaaatagtacaattagtggcaagctgagcagagacagcagcaagggctcaccttccattctctggtcccaacttcagcaagtgtttatttagcatttgctgtgtatctagcatgttctagatacatgctgtaaccaactagattaaaaactctttgagagcagacacttggatttatacgtttctcttataaatcccatctcttgaaaactattgcccttgatatgataacggcaagtctgtctagttccttgactttaaaggtattaaatattaaatccttgttatggagatgcttaatttttctgttgcaacacagatcaccctccctcttcagatttgagggctagtgacttgaacacttgcaagttaggtggtttgggacaaaatacctaatctcttgggagaggaagtttcctcctttgtgaaatgaagaaagtaacattcatcatacaggaattaagagaagagatgtacctgggtgttaggaggtgctctcctgccctcacaggatatagtagtatcatttaccccgtggactgagtgtgcagtggagcacaggggaggtgggggactgagtaggatggcaggaaagctggctagaagggtggaacagtacctttgataagaatatgacctgagacaggatggtgcctgtgggaatgagggggaaaagatgaatctgaaatatatttcaaaagggaacatgacagaatatggcagcagattgtattaaaatagggtgacaaagaagaaagaatcatagtgaggagtgaaaaaatgatgggtttatgattatggcaaagtctaatgtgtgtgtgtgttctctaaaaatcaaaaagctagaacaatacagtatttcagggacttataaactaagaaaagtaagagagaagaggaaattggagtgctctagttaacttatgtaaagggaaagggaaaaatcaatgataaaccaataatatagagctattgctgacaatagaatgagaattcaaaggaattgcttaaaatggcaaatctatgtttggagtttttcccagacaagacccacaatcatcaaataataaggctcttctgcaatcttggaacttatttaagttttcctgagttaaaaaatgccactgaggggatacaaatagtgtcagggttgggaagaaaaaagagcacgaggaatggaaattctcaaaatagctcggttttaaagaggaaatgggagccaaaagatggctagttgacctttcagaacataaccattcattatgatttgtcagaaagtttggcaactgttattccctaaataacttattgtgatttttaaggaaattcaagcaagaatcaaaattataccaaacccccaactggcaaaaaggttgttttccacaagttcatttgcaagccctttataggagcgatgttgtaaacatatttaggctccttttcaaaagtctacccaacccaccctcgggtcaaagtcatgtacaattgcaataaaaattaatagcaaaaccacttttcatgttaataattaaagcatatataagcaatattaagcaatgactatataagcagtaagcaataattaaagcataatagaagcaataatcaccaggatagaaaatattttgaatgctagtgttcagggttaactacaagatgatatgtatgggttgtgactcttttaaaatttgtgtctgccttcactgactttgagacattgacttctttcattatgaaaagtaggattttcctgtccttatttcaggcatatcatgggttctacctttacccatatctgccatgatttgggttgttttcacaaacgaggatgagagaaaaaggcgggtagtgagagagatacctgaggtagctggggcaaaagttgagaggaaaaacagcaggtttaaagtatgagtgagaaggaggtcaaagggcaatgaagggagcactggacattgaaggaggaacacaaaaaggtgtgcattttgctcttgaggggaaagaacattgggcttcatggctccctggatcagccaccagggggtgcttcagcctcagagaagttgtctcttgagtctgggattcggctcttgactgggtagacctgaggaacctccagtgtacgtcccccgatttaggtcccccttgtcttcacttccttccctgttcagtttggataccattgcctatcatttcaatcaccctcttgtccatattactggttctcccaatcattcattcagtaaggagttattggccgggcacagcggctcacgcctgtaatccctgcactttgggaggctgaggtgggtggatcacttgaggctaggagttcgagactagcctggccaacatggcaaaaccctgtctctacaaaaaatgccaaaaattagccaggcatggtggcacgtgactgtagtcccagctactcaggaagctgaggccagagaattgcttgaacctgggagatagaggttgcagtgagcctagatcatgccactgtactctagcctgggccatggagttagactctgtctcaaaaacaaacaaaacagaaacaaaatccaaaagatttatggagtgactcctgtgcttcggacattgtcgtactggatacttggaaatgaatgaagcaggtctgtgcctgcccttgtcacctaccaggtccaataccaacccttcctcagtccagttgtaggctttctcttgcctccagccaggctgctgagcagtgccagagaaaaccacaccactttccacatggcttctgtggcacatccatcgccgccaacctcactggacccctcggcacaactgagccatccttacctattctcctaatgcatttctacccttctccccaacacccatttgaagatttctactctcctcaaatccttgaccaaaccacctccttggtcactttttgcaaacagcctcacctcttaccatgcaagatttcagcttcctgccaacaaatcaattacctgcgtagtccaaataaaaccaactgccttgtggacagttcaacacagtgaaatcaagtctaactccaggaagccttggaaggctaaggaggtctttactgaaagtttcttgaggagtcagccaagaccaaaaagggcactagtcttaaaatatatagctagatttcctaaaaatcatctttacatgtctttcttcccaaagtctggctcctcctggtggcagttcgtttcttcttgccctctgccctcttcctctgtttcttcaccagctgccacactcatctgccttgccttcttaccctggcctgccttttcttattcctgcatgggtagagcacactagcctgtcttggtgttggccactccccccaccacccattcctcttacctccatcaggacgagtcatagatggttgaataagcagtttatcctccttccgagtgaagggagggaggcattgcaaatactggcaattatatatatgtgtgtgtgtatatatatatttttatatgtgtgtatacatatacacatacatatatatagtccatttgtacaaatccatttctagtccctcaggttaagatagaagaggtttttcctcccgtgaccccttcatctgtgtcctggaccccattcactctcatcctcttgggatgcttactttatgcataatttcttccatttcttatatctttcaccttttcatccccagtggatccttctcatctgagtgtacatgggcttctaccattccaatttaaaagagaacaagacaaaacaaaaccttcatcttccccttgcacccctttatctactctatctccccttttatagccaatctttgtcatggaattgtctatttgttgtatccatttcttcccttcccagacactcctcaatccacggtgattaaaattctaacccagccactccacagaaagctggctacctaaagtcatcccctgcctgcttgttctgaatgtgaaagagagcctcagtccttaatttttctatagcatttgacattgtggattcctttcccttcttgaaatattattttcttgcagctttttagtgctctcctattccttagtctctgtaggcttatctttctttatacactattaaaatataagtcgtattcaggggcactcttctgactttgggagaaatggggagatgccattcattgctgtggcttccgttaatacatacatactattgactcccatgcttagatcaggcctcactttgggaggcaggatacagatcccttctgcttggagaacagaactccaaactcaacttggattttaaccccaaaatggtgcagtctgagggtgggcctgtttttctggcccaaaccaataatttgctgaattacccttctgttacaaaaaacctctctcaaacatgttctatcactaccaccaccaattttgttgtattgatctcctttggggctgaaatacagactttaaaatcttcttacattcttcgatagtctagtgtttatagtgtaaactttatagaatttgtcccgctaattaagccaaaattttagaatgcgaaagtcttttctatctcaaaactgctcttttttttttttttttcttgagacagagccttgctgtcacccaggctgccaggctgccaggctggagtgcagtggcgtgatcttggctcactgcaacctctgcttttcttcctgggtttaagcgattcttgtgtctcagtctccctagtagctgggattgcaggcgcccaccaccacacacagctaattctttttatttttaatggagatggggttttgccatgttggccaggctggtcttgaactcctgacctcaggtgatccacccacctcggcctcccaaagtgctgggattacaggtgtgagccactgtgcccagccaaaaactgcttattaaaaataaaaaaaacctttgactgtctgtattttggataaataaatctatttagacaagcagttggcttctttgtttccttcagttcttttactgtccttggggtaactgaatgatctcatagggtcaatgagatacaaacttttaaatattttaacctacacaggaatggaaaagggaattgagttggtgagaggaatcattcaagagaagagactcttgacccttgaacatgaaggtccaagagaatactcctttgcttatctgaacagattccttatcatctgaaatgtatctatctcatgttgaaactggtaatggttggaagactccatctaatttttcaacacttcatgagtaaatggatttatgattgagggtatggctatttgttgggcattcataattaaaatgtggtgaaagatagaactaaatccactggccttgtccaatttcatcctgattaaataggcacaagctaatttccatccaggccaatctacataggtaaaggagttaatgtttaagaaactattttgaacctttgagccctaattacattttggaaaagtttcttgtgacagagaagaagtctgatgatttggatcaggaaaataaatttttatattacctttttaacttctttaaagccactttttgtagaagaatatggaatatatttgaaccttccagagatgaagaaagtaaaacatttcataaattcaaatcatgtcgtagttaaattaatccaaaatttaactgttagtcaatgacagagaaatggaagaaggtgtgacatgcttcagttgctggactcttatcatccaggcatgcaattgcattttgaacagattggaatcacatgaagagattattggaccacctaacaaaacgagcatcccagtaatcaatctcagaaataataaaagcatgaattaaatgtttttgatcaatattcacccaactcatatccttaatgataatacttaactgaaagaaagacctttgcttcaaggttcatttgaaattcacagagaactctaaatttgttttgacatcctaatgcttctggaaagtatgagtcctgtatttcattttgtagaattagagcagactgcataacatgctcttatatagcacagactgtctctactttttcattctatgttttaataagagaaaatgtaatggggaagggagacagaggggaaggaatctttgtattggggagtgggaggaaagagccatgtgtacagctctctcctgtgaatggtgcctgtgccctctttaaaggtatgtctcttgcagataaattcaaacaatggaagcagctatctgtctgaacctgacagtacttattaattcagaggacagaatcatagttctagcttcatcttaattaagtgggtttctacagtttttcttcttctaaaaggggaacgtgtgtgttagtccatttgcattgctgtgaaagaatacctcagactgggtaatttgtaaagatatgaggtttatttgggctcacagttctgcggcctgtacaggaagcatgatgctggcatctgctcctggtgagggcctcaggaagcttgcaatcatggtggaaggtgaagggggagcaggcatgtcactgacgagagctggagcaagagagagaagactggtctcaaattcctgggctcaagccatcctcccgccttggcctcccaaagtgggcctggcatcttgtaggttctcaataagtgtttgtagttttggtatctggagccaactagaatttgatctgaaaacaaagtttacattaaataacaaaactgaatttccccccattctaagtgaatctccagaatgattcatttccctatctgtaaaatatgaagactaacccttacttcatggagttattaggggacctcaatgagataacacaggaaagtccttcataaacaatccagctctattaaaatagaaggtttatcatggaaaaaaccaaaccagagcccttgataaattcttagttattgtgttattgttttgggtttttaaaaaaattaatatgtgctttttaaggaataattttgagcatctgaagttaaaatattgaaaaatctctttgctaaaagtcctttccctgtgggtaattttatgctgtatattagaaagcacaggaagtccaacatcttgcatggagttaatggtaaattttgtgtcttgagaactatagatggaaaattgttttctaatatttagatgtttcacccatgtagctgtgtatgggatatgggatgggggtgtttgtcagctcagcctcttagccatccaccctctcactgcattttgatgatttttattatgcacaaccatacaatattgctgatatttgactctacttttgacctacaaaaatggtgattttgtatgttcagccttaatataagtatatttctgttattgaatgtgtgtttgtttatctgctctgtctcacatacgcatttggagggcagggattgtatgtcatatctaaaaggaagtccagaaatctgagctcagacaatgtaaaatataaaatgtagaggtaaagtgtctttttatatgggctgcagatactattattgacatccttcatggagacaaatgcactggaaatcataggtgcttaatagctggggacatcctacgggtgaactccactcccggggagtgggcatttcaaactaggagcaatcctgacaaactggtaacctgggtgtgctgcagcacccctgagtcatctcctcattcccgagtcccgctgccttcctattaactcacttccctctgctgttaccactgtgtggatactgctgctttcacctgcagcttacccaattagggggagatagggtgtccctgttgcactacttttcaagcctcttttattgtaacccatagtaggaatacatttcacatcatgacccggtacactatactgtatgacgtatatatgcatatgatcagccagtcaatcaatctatctaattctattctgttctattctattctatgatatatatcttggtaggccagttgccagttctgagaagctatccatcatgtcttttttgaataaggacccaactaaacttgtggagacctttatgcttcatgagagagggaaaaaatgccagttcaatctttaagctttttatccctcttaagtagctgtggcctgtgtcagtttatgtcaggatttgttttcctattcctggttttgagaagccacagccttgcagataaaccccagactagactggggctatggcttcagtaacaaagttctggaacccatggaattaattataggtggtaatggcttcagtcacggtgggatgtttcagtttgaccatgactatcacgagagatatgctgctgtgtgcatggatatagccaggtgagattacttatctttatgcttgtttcctatttcaaatatgactttataattttttcctatctataaattgagatttaaatttattaaaattcctatgcagagacgtataactaaatacagactatggattttgctaggagaatcagtagcttgggaatattttggctttgattaaaacttttgaaatgttgtgaaaagaggtatagcacctttaactcaattctaaatttttggtataaaacttgtatatttatttctattagaattaagaaaaataaacaccacttgcctgccttaagtctcagatagtctgtttaaatgtggcttttccagtggtccactgcttttaattcagtgacctatattttctaggggaaaaaaagaggcagtttcttctcctcatagggttgttccatcattatcaaactagactgtatcatatctgaaatcctgctaatcaggcaggaactagaggcacgaggctttcttgttcaggtgaattcagaatggatttagtgtgttgctcaaagggaaaacttttgaattaacttgccttagacttgcactgatttttgaggtgtggaggcccttggcagagtgttttgattggtatcggcctgctttctgcagtgagaaagctgactcaagggatatgtgacaatcataggagatttcctttcaagaactcacagaaatggcttacagagcccagggttagatggagggtagtggagggcaaggcacaaaatctggatgatttatctcagcctctgacacattttatatcgttgagtaaatcacttaacctctctttgccagggccttcagttgtaaaatggaaataaggttcccatttcatagacctcactaaaagggatattatctattttgacccaaaaaagcagacttttttttttttttttgcactgaaggtaattctaaaagagttacaacagtattttgagatgacagcattatcgaaataagcaaatgaccagccaaaggaagtatatattaaattagggtaagtccttcagattaaaaaaaaaatgcattgagaagctgctattttcaagacactttccaattcacttttacatggctgtttaatcctcccagtagttctgggtggcagttggttattttcctgtttctaattttatgaataacataactgaggctcagagaagttaaccaacttgcttggagtcacacagcaaggaagtagctgtgcccagcttcaagtctgatgttaggtccagaatccttcccatgatgtatcatctgcctttgatgtgggattaagagataatagcatatctgaaaacaaacctactttctgagaaaactggataaatgaaagacctatatttagtttctaaatcttacttcagtttccaaatttgctttattctctggagctgtttttctttaaggtatatattgtattgtttccactttgttgtttctatcaaatgcatttgttagttgttaatggttctttactagttcttttagcactggttaacaaaactcttcagaggcttatctgtgacgaactattattcctttttaagatatatgactgactcctggtgaataatctttgcagcattgttatgcctattttcataatttacaacttttaggataaggcatccttcaatccaactgggtagtctgctagttgccaagcccagggtagttgtatgttgtgtttttgacatctcatctaagaggatgaaaagttgaacagtgacgtggtttggccctgtgtccccacccaaatctcatgttgaattgtaatccctacttgttgggggaagggcctggtgggaggtgattggatcatgggggcggatttctcccttgctgttctcatgatggtgagtgagttctcacgagatctgatggtttaaaaatatgtggcacttcccccctcgctccctctctctctttcctgctccaccatggtaagacatgcctgcttccccttcacctttctccttgattgtaagtttcccaaggcctcctagccatgtttcctgtacagtctatggaactgtgagtctattaaacttattttcttcataaattacccagtctcagatagttctttatagcagtgagagaatggcctaataccagcagattcctgcttttccttccagcttcacaagcagtagtggtgttacaaatcccctctcacttcaggctttctatgtctgtgaagagttcagactgaccggaaccatttattgaataccccttacttgggtgcattagtcaaatgcaattgattgttataacatgccaccagcttaggagagggaatcagactccttaattgaagatgcaactttggaggacagagtgtaaatcattgaatacaaagtccaataattttctcacagtgaatacaatgtgtctataattgcattctcaatacagccagacaaagcagagatggctgatattcaagactaggcattgggagactcctaagaacctttctcaagattcatccagttttacgtcttgtctggaaatgttctcatgtttctcagggaaccttgttcagagggatgctgctaggtatagtatccatgtacaattaagattacaataaaattaaagttaatgtattagagaatactttgaaagccaagacattttaactgtcatccatattataaccttggcatagtctttagattgtatatcttacaaaggatacaagagcaactctaggtctttcctccttggtccttcagctgctaccctctttcctaattcaacaataactcataatcatttagcacaaactagagatatgtacaaatgcaatgatttaggtaaagatttccttgttgttgccgttgactttaaagaaatgagtttatcaggacataggcatggacaaaaacttcatgactaaaacaccaaaagcaatggcaacaaaagccaaaactgacaaatgggttctaattaaactaaagagcttctgcacagcaaaaggaatatcatcagagtgaaccgacaacctaaggaataggagaacatttttgcaatctatccatctgataaagggctaatatccagaacctacaaagaactcaaccaaatttacaagaagaaaacaaacaacctaatcaaaaagtgggcaaaggatatgaacaggcacttctcaaaagaagacatttatgcggccaacaaacatatgaaaaaaagctcatcaccactggtcattagagaactgcaaataaaaaccacaatgagataccgtctcacaccagttagaatggcaatcattagaaagtcaggacacaatagatgctggagaggatgtggagaaataggaacacttttacactgttggtgggagtataaattagttcaaccattgtggaagacagtgtggtaattcctcaaggatctagaaccagaaataccatttgacccagcaatcccattactgggtagatacccaaaggattataaataattctattataaagacacgtgcacgtgtattttttttaaattatactttaagttctaggatacatgtgcacaatgtgcaggtttgttacatatgtatacatgtgccatgttggtgtgctgcacccattaactcgtcatttacattaggtatatctcctaatgccatccctccctgctcccctcaccccacaacaggccccggtgtgtaatgttccccttcctgtgtccaagtgttctcattgttcaattcccgcctatgagtgagaacatgcgatgtttggttttttgtccttgcgacagtttgctgagaatgatggtttccagcttcatccatgtccctacaaaggacatgaactcatcctttttatggctatatagtattccatggtgtatatgtgccacattttcttaatccagtctatcattgttggacatttgggttggttccaggtctttgctattgtgaatagtgccgcaataaacatacatgtgcatgtgtctttatagcagcatgatttataatccttcgggtatatacccagtaatgggatggctgggtcaaatggtatttctagttctagatccctgaggaatcaccacactgtcttccacaatggttgaacagtttacagtcccaccaacagtgtaaaagtgttcctatttctccacatcctctccagcacctgttgtttcctaactttttaatgatcgccattctaactggtgtgagatggtatctcattgcagttttgatttgcatttctctgatggccagtgatgatgagcattttttcatgtgtcttttggctgcataaatgtcttcttttgagaagtgtctgttcacatcctttgcccactttttgatggggttgtttgtttttttcttgtaaatttgtttgagttctttgtagattctggatattagccctttgtcagatgagtagattgcaaaaattttctcccattctgtatgttgcctgttgaccctgatggtagtttcttttgctgtgcagaagctctttagtttaattagatcccatttgtcaattttggcttttgttgccatcgcttttggtgttttagacatgaagtccttgcccatgcctatgtcctgaatggtattgcctaggttttcttctagggtttttatggttttaggtctaacatttaagtctttaatccatcttgaattaatttttgtgtaaggtgtaaggaagggatccagtttcagctttctacatatggctagccagttttcccagcaccatttattaaatagggaatcctttccctattgcttgtttttgtcaggtttgtcaaaaatcagatgattgtagatgtgtggtattatttcggagggctctgttctgttccattgttctatatctctgttttggtaccagtaccatgctgttttggttactgtagccttgtagtatagtttgaagtcaggtagcatgatgcctccagctttgttctttttgcttaggattgtcttggcaatgtgggctattttttgttttgatatgaactttagttttttccaactcagtgaagaaagtcattgatgtagcttgatggggatggcattgaatctataaattaccttgggcagtatggccattttcacgatcttgattcttcctatccatgagcatggaatgttcttccatttgtttgtatcctctttattttccttgagcagtggtttgtagttctccttgaagaggtccttcacatcccttgtaagctggattcctaggtattttattctctttgaagcaattgtgaatgggagttcactcatgatttggctctctgcttgtctgttattggtgtataagaatgcttgtgatttttgcacattgattttgtatcctgagactttgctgaagttgcttattatcagcttaaggagattttgggctgagacgatggggttttctaaatatacaatcaagtcatctgcaaacagggacaatttgacttcctcctttcctaattgaataccctttctttctttctcctgcctgattgccctggccagaacttctaacactatgttgaataggagtggtgagagaggtcatccctgtcttgtgccagttttcaaagggaatgcttccagtttttgcccattcagtatgatattggatgtgggtttgtcataaatagctcttatttttttgagatatgtcccatcaatacctaatttattgagagtttttagcatgaagggctgttgaattttctcaaaggccttttctgcatctattgagataatcatgtggtttttgtctttggttctgtttatatactggattacatttattgatttgcatgtgttgaaccagccttgcatcccagggatgaagcccacttgatcatggtggataagctttttgatgtgctgctggattcggtttgccagtattttattgaggatttttgcatcaatgttcatcagggatattggtctaaaattctcttgttttgttgtgtctctgccgggctttggtatcaggatgatgctggcctcataaaatgagttagggaagattccctctttttctattgattggaatagtttcagaaggaatggtaccagctcctccttgtatggtagaatttggctgtgaatcagtctggacctggacattttttggttggtaggctattaattattgccttaatttcagagcctgttattggtctattcagggattcaacttcttcctggtttagtcttgggagggtgtaggtgtcgaggaatttatccatttcttctagattttctagtttatttgcgtagaggtgtttatagtattctctgatatcccctttatcacttttgcagcactattcacaacagcaaagacttggaacaaacccaaatgcccatcagtgatagattggataaagaaaatggggcatatatacaccatggaatactatgcaggcataaaaaaggatgagttcatgtcctttgcagggacatggatgaagctggaaatccatcattctcagcaaactaacacaggaacagaaaaccaaacaccccacatgttctcactcataagtgggagttgaaaaatgagaacatatggacacagggaggggaacatcacacattgggtcctgtcagagggtgggggaccaggggagggatagcattaggagaaatacctcatgtagatgatgggttgatgggtgcagcaaaccaccatgcatacaaaccaccatggcacgtgtatacctatgtaacaaaccgtaaattttgcacatgtatctcagaacttaaagtataaaaaaaaaaaaaagaaaagaaatgagtttaaagtccagttcaagacctggatgatgagctgttccctactggaactaaaccttgcttttctcactttgctgggctgcggcaccagctgtaacccaagtccttcacatgccctagaccggcctctcagataaaagaccccttccttctgcccttgctgcctgtattctggaaagcacccagccaagtgctggcctgaagctctttcttcattgctaccctgatgcccctggagtgtgttatgggtgagggaccttctgtcttctccatacctttggaaagcagtgactctcctagctattggaaagatggtgctgtataattttaaacatactggaaatctgcaatatgaatagatcctcagtatgttttgttctttcactctaagatgattgctaagaatagaggcaaataaactctaagaaactttgtctgtgacccctccgtgactcagccagcattactaatttgctgtgggaggcaggttttgaatttgttagaacaaattacttaagttgtgctctttgcattagaatctgcacttcaaatgaattaattctacacccacctggtgtgaaaaacagcgtaaggttagagaggtggtaaagtggaactagagatgggggaagtgatgctgtggttattcttcctccatcatttctgtgtaggtccttctgaccacattttctattgacaaggttacctcccctaatcattctcttctatctttttcccactcacccaattgttgatggacccattcacattctaaccttgtaccttacctcaaaatattctgatgtccatgtgagtttgtatccagaaggattctctgtgacagtcttatttctaggagagtctgttcatttctaggaaggactataactacagcttggggcagatggcagctgtccagattgcagtgtgtgattatttctgtagttattcctgttaaaaaaacatccaagtttgttaaaaattgtcgggaagaagctcaggaaagggacagcatatttcactgagagccatcagaactttattcttttggagaatgaaggcaggtaaagtagacagatggatttagaaacaacacctggatgagaagtcttatatattacattccctgctaaagtaaagaactcaaaatattttatcaattgacaaggaaagtccactagctagaaaaaatgggcaacaatgtgtataggcgattcacaaagaaaggaatatatttcttcttttggtcgataattatgtaaatatcactagtagtcataaagacgtaaatggagacaattagatatgctttttcactcaccagattggcagtgatggaagtaatcaataaatatgcagtgatgggaaagctgtggggaaacaagtactcttgtactctgcaggtggggctgcaaatattagttacattttgcagttgacaggcagtatttatcaaaattttaaatgcacacaccatttggccaaatacccctaagtctagatatctctcctttggaaatgcttgcacatgttcataaagatattatataagggcctgtttttggtagtattgtttgctatagccaactactggaaaaactctaaatgtccatcagtaaaggactagttaagtaaatcataattcatgcttaacttgaaatactataagctgtttaaaaaactgagagatctatatatactgttatggaaatatctccaagacacactgctaatgcccaagcaggaagctgcagggacaatacatatgattatgattccattcatttaaaaaataaacctaaagccatagctttgtatatatacttagatatgtacataaatacacagataaagtcatgtaatactatataccaaaccgttgacagtgcagcaaagagaggaattggggtggagtgacgaagcgggacttttaattttttactctacgtacttctgacctttgatattttattacatctctattacaataaggatgaattactttgggaggccgagacgagcagatcacttgagtccagtagtttgataccagcttgggcaacatggcaagaccccgtctctacaaaaaaacacaaaaaattagccaggtatggtggtgtgcacctgtagtccaagctactcagaggctgaggtgggaggatcacttgaacctagaaggtcaaggctgcagtgagccgtgatcataccactgtactgcagcctgggtgacagagtgtgaccctgtctccaaaaaatggattacttgtataatttgttaagcgtatataaaaataggaaagttgcaacttagctttctgggaaaagtactctgaattgcctcccaaagagactgttcaggaaaccaaaggtgggtggtacaacaaaagcttttcctttttattttggtagtggttggtccatttatataatggagcatgacaggcttttttctgtacacttttcgggaagcatacctgcatagcctgcaaatgaggtggccatcacaaacagctagctgagacagcgacttacctgcagactgaaggggtgggggaatcacatgcccacttgctgactggaaccaaagagtccatcattaaacataaaatgttgctcaggtcccactgtctacctcacttccctgatgccccagagctctggtggactcagtgctccgcgctctggggagctcaggaagcctagggctcacagctatcattagattcaatagagctcacgctctataaaatgtgcttctctaggctcctaaccagcaggcatagcattgcatctccctgacaccttcctgaacttctataagtacacattgcatagtaattcattgtttacatgtcagtcttcttctttactctgtctttattcatttctgtattcccagagctcaatacagtgcctggtatataggaaatgctcaagaaatgactagaataaaggataaaaagtctagattttgaagaactgtcttataagtgaacttttgaaaacctgggctttccttggttggatataagggaaatgtatagaagcacgataattaaaaactggtacaattaaaacttagctatatggctagttggttcaatgtttaggctttggagttaatagcttatgttcaaatcctggcatttccacttactagccagtgacttgacaagttctttaacctgcttgtgcctcagtttcctcctctgtaaaatggagataccaaagtcaatctacctcacaggctggttgctaggattcaagagatagtgaacgcaaagctttaacagtgggaatggcacatagataaattcatttgttgttcactcttagtgattgttgtctagaaccttcaagacatgtcattctagttggtcaagttttttgaatacccctttaaaaactgagtttttcttatttaaccaactttgtgtattatcttttaaaaatggcttctatttcctgaaacaatataatgagcatctccattttaactcaggaacattgtcataagcagtaattattgtcctgtgcacaacacagaaatactgcccacgcttgtggaggtgtgtggaggtgtcacacttcccaactactctgatttttgagttcttctgccttacatttattaatggtcaactttcaattcttactaagctccatggccagcttttagtactttctttgactgtttttcttttttctaatatactgtgctcttgggaatcagactaccaagtatgttataattgtgtagaaataagagtggcttgatgaggctcttactgagctctctaatgaataaggcgaatgctttttataatttccacattggttgaattctttcctatttaatgccaatattttatgtatttaagacagacaaagttttagcatatgcaaaaaagttttattctattttctattctacagttttaacttgaattcaacataatgccatggactgagctagaagttttagcacttcctcggatagaaggaagcagcctgcactgtggggaaggacattaggttcaggtcttggatctgctagttagttgctgtgtgagctcagtttcatcttctctaacaaggaaaataagatgggcactcagttgtcagcaaggcttaaatagtctgttaatatcagtgaaagtgctaacattttgttgttagaaatggtattactccaacacgtttgtagttttttaaattgtacttctaaggatctgtattgagagactactttggtatgccttatcagagaattcatcagtggcctttaaatgactcttttcattttaaacattttctaaaactgttgtgaagctactctctgagggatgatggagtaaggtagggggacaggctcttaaaaatgccaccctatggggtttagtgagctgggagttggaaatccctttttctaatagatttaacaataagctcttttagacatacagatgggaaagcattaaaatatatatgtggtgtgttcatgttaacaggggactgttgataattaagtaaatccaacatttttcttctaaacttatattaactttttcaaattaaattatttctgtactaaccatctgtccttgtgttcccagcatgaaatgccttgtgattagttagtaaacttttactcaatttgaaatgtatctgataccgtttccccgcttccatatttacttcctcctctctttagacctcaatgggtatctgcctgaaatgaattcctctttgcagtcctgtgtcctctggggccagctgaccatgttgagaccttgagtttggatccaattttgtcttcattacacacttaatgggcctcactcagggcctgtttaactctgttgtttaatggagtacaggaactttagagacacccaggactaaaatgcaagaatctaaaagacatggaagctgaatttaaaccacaaagaagttcaaaatgcactatgagaagctatcataggaggaggaggaggctgtgtgttatgagggaagcatatggaattcagaaactcaaggtctgtgtttatatctggacttttacctgtgtgagtcacttagcattgtcatttcatcattagcaggtcatttcatctctgagactcagtttcttcattgatgaaagtgaggatagtgtctgttctagctataatgtaaagttgaaaaaagctcaaatgagataacatgtgaaagtgctttacagatcataaggtgctagcaaacattatcattatcatcatcatcatcatcaccattatcaccatcctaactgctgttaggaagacatgctagatccaagaattctgaagtcctggctacttgaagcatcagactgttttcctgcttttagttgcttcaagtccaattgttgcatttactcatgttttgtcattaaattttaaatttgttcatttccaattatccactgatttggaagcatggagtcagagtaggggagcagatgagcaggaacatggtcagaagacaggactaggccagtttaaagcaacgtgtttaatatgtgttaaaaaaaaaaaggagtgaattttaccttagggctagactttgtcttagtctgttttgtgctgctgtaacagaatatatgagactgggtaatttataaagaacagagatttctctcttacagttctagaggctgagaagtccaaggtggaagggcttgcggctatcgagggccttcttgctgtatcatctcatggcaaaaggcagaagagcaacagagcatgcttgcaagagagggcaggagatccaactcacagcctcaagctccttttacaatcaggattaatccattcatgaggtggagccctcatgacctaaacacctcccattaggccccacctcccaacactgttgcattggggattaagcctccaactccaattgaactttggacattcaaaccctagcatacttctgacaagtggtcaaaaacattcatattggagtttgatgaagactcttgaagaaaagaccaattcatggtcaaacgttaatagaggaaggaaaataggacctgacatttttaaaaattctgctaggtaaatacctggtgaagttttacccagaagatgtttttctctcctagaagatgtttttaggaaaggtgggtatggttggaagcccgcttcagttggcagtgtctgggagaggacttaagccacagaatcaacttgtgtggtccttgggaccacagaaagcccaacccaaatctgacttcaagcagtgtgaagatgagatgcaaaatatggtttggaagaaggcaagagcattgggtccttccttaccttgcatttaggttagtgaaaagaacaaaccatatataaaagttattttggaggagagaaggggagaaattatatctacggtcagtgaaataattggcctcatggagttgggacagcagctatggtatcacaccaatttttgtcttcattgattaggcttcttccggtaactaaactgttgccacagcaattttgctacaacagtgacctctgatgacagtgtttaaattctactatacccctgcacctccaccccaggaccagggagccaacagtgaactgttaaaatgtatgaggtagttccttgctgggaggcttctcctacagcagtgttttcaagttggaagccatgaaaatggtctgaaatattttaccttcagatacaagtccttaatctcatgttgaccttggactgtaatttggataaccaacagttttattccctatttacagcagggaggtagattgattaggaaacttgtgtttgcagtcagtagtgttcctacactggagcctctatccctgtttggactaacatttgcaacatcagtactgaatttgccagaagattcagttttgcttgaagaaacttatctgagatcacctccaggcttctcatactacttgtcagcatagtgcgtgcttgaaccagctggagattccaaagcattgcctcatatgtgggaattctgtgcttgtattaatgccacacctgttccatccctaccataccctctgagcattttgagaagaatgatagggctgttattcagctggtccacacatgtgtgccccaaaagagttttaaaggtctgttctgaatgatctgtgcccatgctgtttaaattgtgagatattttgaacatggtccctgtgatatggtattatttttttccaaaaaaatacatatgcaacatacttcagtttagcagagttttgtctttgatcataaaagggagaaatttaggaagttctgacagtgcttgaaaatcatttgcatttgccttgatttatttactttctgatgaaacataaagattacttgtagcaaacgctattgttgcccctctccgtatacccttggcctatgcctgggtttgtcagtagccacagtggactgccccctgtcccctgaaggcctcccatttcaagtatcagtatatctctacttcatctgagggttttcttcaatgctgggggatattcacagcccaacaagccagcacagacacttcagggatctgatgctccctggtgcgtttgaccatgagggctgaatgccccagcttctgcatccctctgtgggtcagcgttacagtgtgttccacacagttccccagtgggtccccagcaggacagagccccagttgcccatggcggtattggcttttccttccccctgcctcactttcctcctccctgcctcactttcctcctcccttatctatgcctcctgagattgcctcccaagacctggtctctgggtctgtctggggaacttaagctaagacagaattgttccctgaactactggtttaggttcccagctggtcgccctgtgtattagtccatttcatgctgctgataaagacatacctgagactgggcaatttacaaaagaagtgttttattggacttacagttccacgtggctgggaaggcctcataatcatggcagaaggcaaaaggcacttcttatgtggcggcggcaagagagaaaatgagagccaaatgaaaggggtttccgcttacaaaactatcagctctcatgagacttattcaccaccacgagaacagtatgggaggaaccgcccccatgattcaattatctctcactgggccccttccacaacacataggaattatgggagaacaattcaagatgagatttaggtggggacacagagtcaaaccatatcaccctgcttggcatcttgccaccaacaccctgaatctgttagaaatgcaaattaaccaagtgccagaacctttcatggtttcctcttgcctaggaatggagtcccagatccctaatgcatctcggtgccctgagtgccatggctgctgctgcacttcagtatgtctgagaccagtgcagccactgggacttctctcccttcctttccctgcaagctgccttcacgcctggctcttctgcaccacctttcctctgtgggacttgtttatttgcactcttttgtttaccagctcctaagatctttgaggcttagtccagcccatcgatctggagtagcctatgcttttccttcctagagcttggcgtatttgcaatgatgtagctcatttgccattgcatgtttaacatctctttctctagaccagggatctgccaacaactacagttttattagaacacaggcacatccatttatttacatattatctatggctgctttcatgatataaccacagagttgagtatctgcaagagaccacatggctcacaaagtctaaaatgtttaccatgtagacctttacaaaaaagcttgcagactcttcccctagactgtgaactctgaaagaagagtctcctgctcactattagaaagaacccagcactcggcatagtccctgacacaaagtagacataatataaatatgtctgacttgaaacaaagtttccatgaatgcatttcttccctcttgatttgtcccttgtcttgagaattttatgtgttcttggggcagtactgttcacagcaaggaaacatttccagacctggagtgtgtggtacccccttcttttagctctttatcacacagaagtgagattcccacctctactgtcatgttcactaggcaatgccttttttttttttttggcaatgctctttctaaagagatagagattttactatttttttttcttccccatttgtttcagaccaagtgggacatgatgccctatgcaaagtgttttccagactcttgcttgtttgaaaagattctcacttccacttttacgtgggaaagcatgccctagctatttaatttgaaaaattggccgggcgcggtggctcttgcctgtaatcccagcactttgggaggccaaggcgggtggatcacctgaagtcaggagtttgacaccaacgtggccaacatggtgaaaccctgtctctactaaaaatacaaaattagctgggtgtggtgacacatgcctgtaatcccagctacttgggatggtgaggcaggagaatcccttgaacctgtgattcagagcttgcagtgagccgagattgcgccactgcagtccgcagtccggcctgggcgacagagcgagactccgtctcaaaaaaaaaaaaaagaaaaaaagaaaaaaaaagaaaaatcagggtatagtgaagtaaagaaagataatagctttaaatttaatgatacagggtatgaaaatatccatattctatgctgctgttaccattttaagcatacacattttatcacctcactcatttacttaaaaaaaatttaacatttttctaagcatctctgtaatgcctataggaacttctctaatctgatttccaaggtgtccttataatcttatctcctgttatgctctagggcaggggttgtgaaactatggcctgtgggccaaatccagactactgcctgggtttgtaaataaacttttattggaacacagccacactcgtttattcatatatcgtttatgcttgctttagtgttacaatggcagaggtgagtagctgcaaccaatactgtatgggctacaaagcccaagatttactcactggtccttgacagaaaacctttgctgatcgctgctgcaggaagccttctgtatctggccactcctgtctcttctcacagttcctctgcttgccgaaccttttcgtgcatctgagccttcgcacatactgttccctctgcctaaaagccactctcccctttcctacttagaaacttctgctacaagctagtgaggccctggttggttttttcatcttctttgtgagacttctgaattcctcaaaatgtattttttcctcttctaggctcccacagcactttgtccagatatatattaaagcccttatcattgttattagtatcataattcacattcttgtgtttatctcctactagagtatgagctgtagaggatgggttccatatctttatttaattctgcatcttccgtgcatccgtccaggagcctggaaccaagtagatgctcaagaagtcactgattaataactgggggtgttgaatattattaaccagtgcacagaaaagagtgtgggggtaatgagaaacacatgcagcagttggagaaattatagaaggtttaactgtaaagtatttaggaattatttttgttctactttttccctgttctttcacctcccagatggggaaaaaatccgaggctgaacaggagccttgaccaagaagacggggaacatgatgcccagctctcctgtatctcagtctgttgtcctttccatgtgcgacaccatcaacagaggcttttcagtggggatgaactaggcacagcatgttaattggagagttattagtaagattgttaatacttctttccacagtggaagaaatggattatttgttggtggaccaacttctaatagtaagtaggaagcagattagaaaagtttagcattagctctgtctttcatttgtggaccaataagttgattttctatctacctcaagttttccctttgaataataaggataattctcagccccaaatactgtctttaccttctatgaaaatatgaatacttttaaaaagctgctttgaatccataatggcctttgcaatatcagcttggtgacgtggcttgttatgatcgaattaataattgtctcctttttcatgaaagattgaattcaatacagaaagcagcatttttcaagagtttctcatatttatctgagtgatggtgatttcatgttgctagagccagttaactgctggatgcttcatgctctccaattgcctaatggggagaatttgacctggcagagagcccagttgtccatcttcctggggctggtaaccacttatagggtaataaaggtgaactttaattgacttcctagacacctcttcaccgagggaaagacacagagaagaggaaagacaactgtgagtgctgacgaacaatttctgagattgataggcagtttagatctaattttaaatagtaggaaaatcatatttatcatctcaaagatcatatttgaatgagaacttacaaactagaacctcccttttaatacttatgaaattatgttttaagagtgtggcactcatttttttttccttactaaagagctggaagagatcacatgacactgtcgcctttcaagttaatgggcttttaacatccttttggcatgttttataaaaaaagaaaaccacttttactggattttcattgttcaggctttgacaataatacttatacatagtaataatgtcaacaaagagtcgtatttgcttacaaacagatttcaattgttgagagaccaatttacgaacggttgctagaaacatgggcagcatttgctatctgttcatagaactactttgcatttaggatggtgtccaaataacaaatgcctcttctcccacagaggtcatttcttctagtaattcccactcacagaacgaggttttacaaggggacatgtttatacgcaaggacaggctttaatcaaatatatatgtatatatatgtatatatacatatatatgcaccattcattctttctcattcactgtgagaatacagacacacacacacacacgctacccactgcatcactaatctgatttgttactttcaaatgtcaatcagcaaggaaaattttaaaaatatagatagatattttgtaagattctagtcaatgtcagtatttaaactcctggaccatatgtggcttctcttagcagattttgcaaaggaaacttactccagtatgcaagactgtgagttgctctctattcctggggttttatctaccagcgtctgggaatgtttcgtgatgtgctgggtttatttctgtagccatagaagaaagatgcatgcttcaatattttacagttgtcaagctcaaatgccacttgggccaatgcctgcagactgaaggcaagacttgaccagacatcttaatagtaaacagtgaatttagaacatgtaaggaaggaaggtccaatgtgaaccgaaaataatttagagggtttttattttggcagctgaggttctgacgccagatgcctgattttgtctgaggaagactgatggtaacatttgtagtggctctatttaaggagaggaagttgatgactgataagagccggggcttagagtcaggactttgatgactggcgacagccatttccacaattgtccttggggactattgggtgaccttttgttgcctcctctgccctttttttcaggagaatagatttctaattgggctacattacaggagactcaaagagttttcttcgcaaggaagttaggctttatgtaagtgaacttcttttgaagagtaatcattggttattttgggaggtattatttctccacttctgcaaataaataaaccagtgaagggggcttagaatctcatccatttagaacttcatccattaagacttcctcctcttggtgctaatcaaccaggttacgtttctctcctctgtccaatgtgtctataggctgtagttcctagcatcttcaaacctagacagacagcttcacatgaatctgcaagaagcagggagggaaccattgagaatacccctgcaaaccatttcttgctatttcctagactgtgaaggaaagatcttgtcaaataatttctattctttcactggatacataatatgtgggaattcagtgcaaaatgaaaacatggggactttcgttaaaaaattattaacagatcaggtgtggtggctcacgcctgtaatcctagcactttgggaggcctaggtgggcagatcacttgaggccaggagttcgagaccagcctggccaacatggcgaaaccccgtctctactaaaaatacaaaaaattagccaggtgcgatggcacatacctgtagtcccagctacgtgggaggctgaggcatgagaatcgcttgaacctgggaggtggaggttgcagtgagctgagatcatgccactctactccagtctgggcaagagagtgagactttgtctttaaggaaaaaaaaaaggaatttcaagatggtaacagcacagtattaaaccaagcgctgacccttctgaacatgcggttctgtgtgactgcacagatctcacacccatgaagacagccctgattttatctttcttcccttcatgagtttcatgggtgattcttacctgatcttaacaaacattactctatgatgtctgtcagatattaagtttcaggtatgtgtccctgatgtcttctgatttaactcaatctctcaatgtatatttgtctccttttccttctccttctccttttaaaaagacattttctatagaagccagctttaatttcctttatggcccttttcctctgtcatgacatctgtttatctcaaaattctgggctggtattgagctaaaaggttcatgttggaaaagtgtgactgattctaagaaacaaagagtcaaattcattgacagtggttctgcgtggtgggatcagaggcagatggaaggggacatagatgggtgcacgtgcagcatggaaggatgggcgggtgcctgacgtccttttcaaataaacagtggagtacagagggtcaggtgtaaaaacagtgacagaatgggacttggtctgcctttattccaattgacaaagaaaattctgatgacataaatacaagaagctttcaagtataaatacaaatatacttgaaagctgactaatgcacatttgctgtcattggtagtgggttcccccaacatattatataggaattcttttccattatcaaagcccaagagaggggaagaagagctgtctttgaatgattgaacatactcaggtcagcaagtccccctccttttctctttactgcttccttcacccattttttataaaatgaccatgaagaccaatggtggaaggaagtcacagtgaatgaaaatggatgaatggcagttctcagccctttgccctgtgaatggtggggtggcagtaaggggagagggtaggagcagggcggatgtgaggggtggagcagtcttagatattcctgagcatccactggcagatgcttgcccgttcccctgagaactctgtccctgaggtccagctaggacatcctcatgctccctattaagcactttcttttcatcgattaatggattgtgttttggaatcaggtttttacttagctgcataaatatgatgcaaaaccttaaccattgactccactgccctttccttatcaatagttgaatatgtgccctggccaaccttccatttcagctgccactgtgacagacagtccctgtgcacatcaacacccctccctagttattcccagtctctcagcctttctggctcaggactgtttcctaacccacaacagcttgcacagcctaaactccagatcgttgagaagttttatgggggcagagggagttagtgcttctgaaggttcacctcagataacaggggattgcagtctgcagatatgtgtcccagattcctgtcctttggaggcacaattctgaaatgcattcaacaagggtccccagtgggatagctagctccttaacacagcctgctttctttccttccttccctgtctcacttgtcctgactttcactcctgcttcctgggattggtcatctcccaaatgagccgcatttaggctctgctttcacgttctgctttcagaagagttcagactaagagatgcccctaaagtgaataggatacagttttggccaggctagcatgcatatatggcagacttctgcatgcattggtccaactgtggcattccttggggcaaaggtctttaaactgataagtaaaagagaaaatcaaaaaattagagatattctttacattgaaaagtttcccttatatttatggcatctcattatgtattgatctatgcagtaaacatttccaaaagcccccttctgtcgggcaccatgctacaggctggtgctagaatgaaagcatttagtctgttaaagagaaacgatgctagaaatctccccagagtacaacgaagatcccgtggaaatggtcagctgtgggtccacagcgaggagttgtacaggataagtggatgagagccagtgggacagagagaggaaacacattagatgagaggatgcctgggcaaaggcagggaggcacagacagccccgtcctgggagagaactgcaagcagctggggcccagttggaggctaacttagaatcaggagatgaaagcggccaccacatgtcctgtgtgaaagtcagtgaagagacaaggagcattgctgaaacatcatgggcacagtaacaaccccattccccgtaaagtttgcactttataaagcgcatcgacccccagatggctgccccgaatcatgggagttgagcacaagacttttgattcaggattctaggctttcaaaaaatatactatactaactttattttcatgttttatgaattcaattttttgttttagttagagcctcaggtgtacaagatattagtcactatcaaattttttatgaagcatttattcacagcaaatcttaactttctttgtcttctttagaagaaagggctccaggaatgcctgcaattcttgaagtaatataaatctaaagcaactttactgaaactcgattcattgagccagagaaaggtccagactgcagttgatctcccatcctgcctcaggcatctctgtctgacctcctgccactaccagtgtgcatctgtttccaaatgcacttccagtcttggccactttcattgcattattgatgtttacaatgccacagtctgatcagttagatccaagctagcagaaaattctgcccaaatctttggtaaagatgctactggaaagcccctattttaattcatttttctatacaaagacttcttcgttcttgaatttaaagatgtaaagaatcagagcagatgtctctgtgtgtgcagtgcacacatcatgggtaagaccagtcacagtgttgagttctgcataatccatagccttgtccctacaggccactgcaccaccttcttcttttgctctaaggagcatgctcactgcctgtttggcatggagtggctggtagagaaccttagagtctagtggtttccctattcagatctctgcttaggactttttcagttcattaacagcttcatcatggacgctgtcctgtagaaacagttgtatgctctcaatagtataccactggccagagattccctttgcgctatgcaagattgctttcctgtgatggcttccaaattttaaactccctttcatttctaaaattgggactaagctttataaaattctaactctcactgttacacttttctttctgatttccttctctttttattcttaggaaaaggatttagtgggagagagtagaagaattattttgtgaaaaatgaagatttattttggaaacgagcataagtgactctgaccagagaagtaggaaaagaatggaacattcatttcagtctgaataggaaatttagactgactgcatgaatgaggatttaatgagaatagaaagctgatctgtgacttggtgaaaagtgggtgccaaagtctggctttgctctgagggtgcatttcagagaaactcaaaggaatggtatcagtgtcttcccatctgttttcttattccagtttgtactaaccttctaaaaacattcatacttaaacatgcacatgcatactctattttggcctttaacttgggcagtgaacattgcgtagtaattattgcagaattggacttgaactgtcttgaactttctgcatgtttgttgcccaattgatactatgtgcatcgagcctcttcaaagaatgccaagcagaagaactgatttttgaattttctttagagagctctctatagcttctggtgtgtgagggaaggtggggagcgatttgttgttactttctgggtctgttttaagtgctcctttggcagcagcctgacagccacttcgctttcatgtttttcatttatctttgtttttaatcttttagagacaacagctggattctgcttttagtacttatccttgattccgtgtcctgttcagagccattccggtgggtttggattttttgaaaggcatgtggcatcctacttgtccataggatttaattaaaagtttggctttttggaacttgtcattggtaactgctggaaaatagagccagtgagtatctccaaggagtcgtagacctttttctacccttgcaggctcctcacctgagggctgaatgcttttccctcaactctgctttggggaaagatcatagacatacactttccctgaaataaactgcatttgttgatttgtcatttacatgaacaagcccccaaaaaggcttatttccttagttattgttcaagattttctttgaatttagttattgccaaaatgatttaattttatatacaatattttacatagaagtaatctacttctaatgtggttctctgagactgccaatctcgaattttgtgttgacataatttgtcccaaaagtatgtgttcaggtcaccaagggcactcagagatgagtatcttatttttgtatatggggaaaaaggaattgggagaggaggggtaaaaagaacactttctcaaaacaaacagacagacaaacaaaccagaatttgcccctaaaccatgcagaatgattggtttacctagattatgaattgataggatgagctatattattacaacaatttagaaattaacccacttttgatctgattccttacattcccattgccctggcatcctcttccataacagctttatttgggaaaattatagtgaaaatggaggcttttctgtgaaataaacgagcagtgaaaaagagagatcataaagacgttgtctgagaagtcaacattttaaacatttctttacaatcttccattcttatgccagattacatgaactgccgaacttcacacacatttgaggaatttaacatagaataagaaaacggaagctactgaaaccatcaagatgtattaaccttccttttcaggtctttgatttgaaatgtccttattgagataggacagaataaaattacccagtgaatgaagcgttttagaatttacaagaagatttattttaatcggctttttatcctctgttgagataagataattttcaggatacatcattatggcacactgatttataatctacaggttagaatataactgcaagttgtgtttaattctcttactcacattttgtattaagcatattcctttgtatacagagtttttcataaacagctatttaaagctatttatataatcaaaatagtatttatagatatttagaaaatgattaatcttaggattgtgacaaagcagaaaaccttattatgtgggtttgccaccaacaccatcccacccccccccaaaaaaatccagttttggttaagttccctgaatgagcgtagtgaaaattagtttcttttggaaggatcatactattgaaagactgatttaaattagaagggcacattgggcttggcagagggcattgtgaaaaagcaaagcataattttcctccaaacaaagacaagcttgttggagagcatgctttattgcctggaaattctatatatatgcaaagttgttcatcagttcactgttgggttttgtgtgcttggtttctccttttgtttggaaaaatcaaatgctgagaaaagtaagcataactctgcatgctataggtactgagaaatcgacacatgccagttctcttggcatgcagtgttcctgtgcggtgagcggcttagggagggatggtcagatttgggctccgtgtgggtaaaatcagcatatatgcttcaccagaagctgcccagaatttctggaaaatggctttcctgcatctttttctgatccctccctctgacaaccaggagaatacatggggcaagttaggcccacatcctgaagtccactcagtgttttctctttttttaacagcttcattgaagtgtaattcacattgcatacaattcacccatttatgttgtataattctgcagctttttcagtatgtgtgcagccaccacaaccagttttagaccatttttattattccaaaaagacaccccacatcccagttagtactctcctgagactcagatttgggtgaattaattcagtgaaatgaaggtgatcattctctaggatgctgggtttttggggttttttaaaaatatatatatatagagagagagacagggtctcgctctgtcacccggaccagagtgcagtggtgtaatcatggcttacggcagccttgacctcccaggctcaagcaatcatcctgcctcatcctcccaagtagctaggactacaggcatatgccaccatacctgactaattttttaatttttttttgtagagacagagtcttgctttgttgcccaggctattctcgaactcctggcctcaaaggatcctctcacctcagcctcccaaagtgctgggattacaggcatgagccaccatgcccagactctaggatgcttttgaatgggagttttcatctattttattttattttattttattttattttatttattttatagagcaaacatcagccagagagttcttatctttggaattgcctttttcacttcatgtcttagcttcacggcacagcaactacatttaatactcatcacatgtactgtactttgtaaagcactttcgcacaagctccagatgagatgcctggctgacagtggaacaaggttaggggtaagaagttccctggtgactgggctggcggaggagagactgtgtaatttcacaacatcactggggtgggttgcaggctgcaggctgagcacagctgtgtggggactccggggtggcaatagcaggagagccagtgaccaaagtggatccgagttaaaaagagggatgtgggaccaggtggatttctgtacaggaggttgggggatttagaagtcaaacatccagatggaagatcctcaaagcagaagctaaagctctgaaagggaggtagagatcatggtagatatccacatgatatgatgtgcaggctggaggaaggagaggctggagtgggaacagaagagttgagaaggtagctgttgaatcctgttccctgtgaaagaatcccgcctgctcgctggataccccacctcccactcagcattaccagaccgtcttctctttactccagttgagtagctcaggtgcttgcttttttgccccccaccattttctcttaataccttttctctgacccacctcactctgtggacccactgggacaagctcctctgggcaacatcttccgtcattgcaaatccctgacacccatgggtgagatgaacaggcattgggcaggttgtctagctccttgggatgtgggctggctggacctgctcacttgcacctggaggagggtatagaggacaaacaagaatgtcctggagggacaggtgggtagggaggttcaggagagattcccctgggtcctgggtccaagttcagagtccctcacctggttgccctccctatgggccgccacacatctgtcctgaaaggtgtcactttcagcttctgacactgtcgtggaagggaggagagtcctttttgtccagattagctgtgtgccacgtgtttaggtgagaaagtggctggcaatgatgtctctccctgcagaacttctaaggaagttttaaaaaggcactcctccactccctcaggttttctttcctgcagattatctttgttttcccccaacttaaatatacctcactgtattcaattatgttgcttaaaagctatgtatatattgatgtgggcaaaatgcagtattatttttaaaacaccaagcattttatttaaatctgcaataaaatcaagaatatctgtatgttacaaatactgaaaaacacacattcatgttttatactttgggttttcataagcatggcacacctgtatcatactgtttagattttgtgttggctggtaaaaaggttggttggtagaaaggtcgtttttcttcttctagtactatagagataatttataggaaagcccagtgtagctattttctgatgagaaaattggcatttgaagttgggtttctagattgcagcagaaatctgttttagtgcatgaccaaagattaatccgcataggaaagtgtttgcagcagaaatctgttttagtgtgtgatcaaagattaatctgcattggaaagtgagactcttggcttgtgttaacattaaaggttggatatacggtgtccttgggcctcagggaagtccggtgtggagaatacaaggaagccagaatgtgcttcccagaaaacctagttacagaagctataaggctgacccctgaggacagtggccagtgatccaaatgacagtgccacaggaggccagcaaattcagacttgacttatgatggcattgaggccaggatgatccgtttttctgctgggtggcacctgcagaagagatttagcaacagtgaaagaacaaaaaatcggacagctgatagcatcaaggctctgggtcagctgtgaagggtgggctgcatttcaggctagaactagaggtatgcaggataagaggtatcctgtatgtaggtatggcaaggagaaggcaggctgtggaccgcatgtagggccgagctccatcccagcaagggaacagacatgcttatcaaggaaaaaggccaagcacgtgaggtggattagggaacgctgtggctttgttgccctgagatgcagcccttccttccacccttggactcctcctcccctcatgccagataactggacacatgggcacccagggatagctctagaccttccctgacagtggggacagagttccccactccgaagaggactcactcgagaggcagaggcagaatggaggacagcagagcctggaattgagttgaggaagacagatggacagaataaatgcagtaagagcaaccatttaaagctgcaactctgactcctttccatttttggataatttttaggttttggttgctgttattgttgtttagagacaagctcttgctctgtcacccagtgtggagtgcagtggcgtgatcatagcttaccctaacttccaactcctgggttcaagggatgctcccacctcagctgcccgagtagctgggactacaggcatgtgctaccacacttggctaattttttaattttttgtagagatgggtcttgccatgttgtccaggtgggtctcgaactcctggcctcaaacaatccccctacctcagcctcctgaagtgttgagattacaggcatgagccactgtgcctggccaatttttagttttgatataattttaaatatatctagcaaagttgcaggaataacacaaaggacttacctagaatttttcccaaattctgccaattgtttacattttgccccattagcaccaatctccctttctctcctatatttttctgattgatttaagacattgtactcttttgcccccaaatacttgagcacatgtttccttagagcaaggacattttcttatataaccataagacggttgtcaaaatcagcaaaactggttccttttaacactaataataatactcaaacaccgtccataatgttttatgatttctgttctattatttttaaactgtcaacgactaaagttttcatttaaaatgtaattaaggttctttttttcttcccacagtgttgaaagagaaaacacatacattatttttttttcaaatatattacatgggagcttttgccaagtttacagaaatacaattgaaagtggagttacaacataatgataccaattagataaagtcatcagagagatcaaaggaattttctgagtgacatgctttatatctgtttaccttggaattaagtatttacagtgctatctcatttttgagaataaaaccgaaatcataagtgggccacacatgggttttttaaaactaaattttcaccaatgagtatattttggcactaattccgagagcacagactgggcactctattcctctgtacttccttttaaaatacaaaattgattagtatccctagattttgatgaattaaatttaggttttgtttttattggtatcaagtgatcatcatgcttcccctgtcccttctcttaaagcaagaagcttattcataaagaacatcacagagagatttgaccatgtacatcatatgattttaaatggcttctttcatcctatctccaaatcactaacattatgtttgtaggtcttcatgcattaggctgatttttctttcaagcatctgttttttgaatgaaaatgtgccctttggcagaatcaatctgagaaacaatgatgaagtagaggaaatgggaactaatatttattgtgtgcctgtgttgtgaggagctttacttgagttatctcattcagtccttccatcaaccatgaggggtgccatggtaattttctgctttattattgtggaatctgaacctcagagtggttgagaaattcaatcagtgattctttcactcaacaactattccctgagagcttcttcccatgtcccaggcaagtgttctagggtctgggtatgcactgagagaaaatagatgccgtcctgccctccattagtctgtggttaacagaggagaaaaagcattgagccactccacactcagatgcggggcataatgacacattacctgggcatgccaatgacagagacatgttgctgagggagagaataactgggggagtcatgaggactgggggttggggaaggccacgctgaggaggttatatttaagctcaggtgaggagaaattggcaagggcaagtggcagaagtacattccaggcagcaggaggcttcaggaggaaaacttcgtgtgttgaaggacctgaaagagggcagagtggctggaaaggaatgaataggggaggcgagtgggggctgaggctggagggaaggcagaggccaggttgtgtaagggctcacaagtcttgttaacagcagtggagatttgtagagctgggattggagcccatgtctgcctggatcttctttatttatttatttatttatttatttgagacagggtctcactctcgcccaggctggagtgcaacggcatgacctcggctcactgcagcctcgacctcttgagctcaagtgatcctcccacctcagcctcctgagtagctgggactacaggcatgccccactacagtcagttaatttttgtattttttgtagagacaggctttcaccatgttggccaggctggtctcgatgcctggatctttaagcttatatcttcccaactctctcagcactgccgtctctcatgccccaccccttcaaacatgtggcaccctaatattctcttccacactattttgcagaatagctaaagcaccactttcattattgacacctcctagcctttatgctggggaaatgtagggcctaatctgttatttgatgatataaagtatgggcctgggtgagactcataagaacataccctgcagagaaaacagagttgagattttctagagtggagagatgacagaaagtaggatccactcaaatgactcaagggttgcaaaattccaccataaacagagacttccaaaaccacacagagctgtattacggtgattcctactacatatatgcagtaagtatatattggcttagattgacaaggatgttttcaggttgttcatgggaacttggagcagcaataatagaaaaaatcataatggaggggaatgaagaaagtcactgcaaacaacatgtgtgggcagaaaagctggcggagtttagaaggaattgaagtacaaagtctcggccaggtgcggtggctcaagcctgtaatctcaacactgtgggaggccaagatgggtggatcacctgaggtcaggagatcgagatcagcctgatcaacatggtgaaacctcatctctactaaaaatacaaagattagctgggcatcgtggcgggcacctgtagtcccagctactcaggaggctgaggcaggagaacggcgtgaacctgggaggaggagcttgcagtgagcggagattgcgccactgcactccagactgggggacagagtgagactccatctcaaaaaaaaaaaaaaaaaaaagaagccgggcgtggtagcagtcacctgtaatcccagctactcagaaggctgaggcaggagaatctcttgaacctgggaggaggaggttgcagtgagctgagattgtgccactgcattccagcctgggcgacaagagtgaaactccatctcaaaaaaaaaaaaaaagtttctaaagatgaagaatgcctgaagctaagaagtagcatgttctgggccagtgagtgtagagaacagacagaagtcactgttcttctgtagtttacattttagtgaccaatgtgcatggatatggcaaaagctaagagaccctatggatactgtatgccccccgggggttactgggtaggatcagacttaagacaggtgagttatatatgaatgcttcctgagaaaattggtcagaaaataaactgagaaatgcaaagtgcctctgccccaatggcttcacatgttgagggacaaagccagaagggatgcctctgcagtgggaagcccaggtgtctctgagccggcagtcttcctgccccataaatctccactcaatcccctctacctggcatgccacccttggagcagtgcactgcagggcgagaaagcaaaaacaagatgatggtagtttgctcaaaagggtcaacagtcatgggctattactttctgtgaaatgatcctttattttaggtttttaaatgatcagtgcatcctaattctgtctgactaatatgtaggcacttttttgtaacttccatgtttccatgatttctattactgacattattgttaattttataagagctgggcttcatgtgagttttaattcagaataattatagtaatattcatcaccccttgaagactaatatggttgaataaaatgttgtcagtcaactgtttctctgtgaacaaggaggcaatggctatgtttttcactgttcttagtcccatttatatgttcactggactgtagtagattcagacttagtgtgatgagaggtaaggatttactatgcaataacattgctagagcaaattgttttacgactttcaattaagtagcattgacctactgtgtgtgtcttgctctcaacttgagcttctgtaagagaagcttatggttgattaattactcaaatatacaaagtgtgcactaactaaaattacactcataccagtgagcccctgaaatctctgaaccttttagtcatatgaaaggcacaaatgggttgagtgtgcttcaacaagaaatcaggggctttaatattattagcaataaatagttgcagatcatttcacctctgcttttaggagtgaagtgtctttaattttctctacccgatacaccacttccctctctctttcctccctcttttccccatttccagcccccttgaggtgccacatctaggcctgtcctccccttcagcacctaataccttccttgttttcccatcaaaaccatcctccaagcagcaggcagggcgatcttttaaaaacacccatctgttcttgtcacctctctacttagaatgcttcctgtcacatgaggatgatggttaaaattcttcccgtgacctgcaaggccttccctgtcctggcccctgtgtgctgaggcctcactaccctcctgtcttccccaattccccttgcccttattctccaccctactggccttctttgtcccttaacactcgacctgctccctttctcctttctcgcttcccctatcccccaagcctcctcagcctcagattcaatatcatttctctgactcccaaatctgaatttgccctctcctccccacccgaacaggttttcaatgcaccctatactttttttcctttccggcatctagcgtcattgtgcgaatccaggtatttgtactgtcatgtgttggtagctgtcctcactagcctgcaaggcctgggaggggtccaccataactcctctgtcaccccccagcaggcatgcagtcaatatttgttgactgactaaatgagtgtggatttattctgctgttgctgcaggattaatctgactgccttctatgactgagacttggctaaactattattcttcataggtaataattctgctttcacttgagagtacttgaggctccctacatgtatgggtcagaatcttgaactgtcacaggccaggaggagagagcatctctaacagggggctttgtccacaactttatctgctcgcttgtagtgtcatcccagttgggctttagtcaggggctcttatgtgattcaggtttggaaagcatcttctactagagctaaagttgtgattcttgcactccagaccactgctctcagcaggttggccatgaattaaaaatggtcataaattgacaagcagaattttgcttccacgtagaaatgtctataaaagggccaaaggatgtaattaggtatcactgaaagggcttcgaacttatttgtgccccattatgcggatgctctaggaatccaggaacaaggaaacagaataacttgccttaagaggtcaactcagtccagccagtgatctattgtgggaaaggcagtgcatgtggctttaaacaggtaaacagaaagcttctgcttgcagccttccatttataactgctttgctttttgccttcttatctaccatgcatgggtttaagaattctgtagtactctgggattttggagccatgtgttgtgtccattttcatatcatctagaggttgtgaaagaactctgggcaagaaacagaaaaaaagggtctaaacattatgtcactcttctaagctattctactgtctaatcatgaggctttcagagaaagtacagatgacctgttctttgtcatgacagtttatgatctcagctttagtatattgggagaacctagtggaacataatgaatgggaccttatgatgagacacatccccacatccccagaacagtcctgtgttattcttccccaatcctggacgctgcctctccttattctgtccctattctgagcacacccccaccccaggtgtttgcagcaatgcctgtcaattatccctgtggcttcctgtttttaatgcttttctggtgctgattatcccagccaaggggtttcagacatatccccagggagcttctgatgctttcgctacagcctgatgatagcccaggaggagggggaaagcaaggggacagttgtgggaaggggtgtgcccaaagctcaggcagcatctgggtgggaatgtggtagccgctgggtgccagcagttgcatgccactctggcctgcctggtggaggctcctccttggcagtggacagcagcttggagaacacccagaaaaggcctcacagagtgccaggaaggccctgacctccacagtagggagtcctgcctgccaggaccctgtcttcacttgtcagatggctcagctcagttcaagctgccagccttcctttcttctctgcatcttgctttgtaaactgagtctcagaaagtgacatgcctctataatgtctcctccttcaggagatgccacccaacttttgtatgccagctcctgggctacctctaggccatatggagacttcgtgcacattataaaaaggggctccctgccccaggcaggagcagccccaggccagggctcaaggcttgttcagcagagctgggtttatccccaccaccccttccccagtctggtggttgctctgccagccttccagccagaattcctcagtgctcttgatggagacaattgattggctgtgaggtagaccaggtttcaacctttctaagactgtcatcttttgtttcatattagaaaatattagtatagtctgtatactaatattgtatttgtcagtataataatacatttgcaactcaatctggggacaggcatctggcctcactggcctgaggacttctgtcccttcccatcccttctttctgccttccctcttccctctattctgagccacaggcacttactttgctctaaaaactggccaattgtaattgacaggttaatttttttaaaggagtctcttagtaacaaacagctcagagggcagaaaggctttgcttgtgtttgttaggttatttctgggctttctctcttgtgctcttcgtttctccatcactttggaacttgttgctttcttgttgaactattttaccatgtgggtgaaaaacaggtggtacattataaaattatttaagaaagtctattatttaaattcttattttcccacaggtccatttagcagatgatcagtaggtgtgttgtgggtcattgtatgcatatcaacagcctcagtgatgtgaagctgtaatgcagaaaatattctttctcaaagctggagactatctggttggaaaatatcatcaaatatactggggttcacttaatccttggtttattgttacaactaccattattattattattactactactatccagaaccatttactaagtgcctgatatgtgcagggaactgttatagattttatttctcatcctcacaatggtcctgaaagatggtgctgttatcccagtttccttacccaagagactgaggtaagtaactgacccacgttcacacaagtagcatgtagtggaatcggaattaagaccccagtcttgtgtgatttaaatgtctgcacactttccgtaacatcagaggttcttggctttttccactgaagctcccaaatgcagaggaaatcaatacataatgcctggggtctataccctttgtagctagaagtagccagcagccagatcagaatttctttgaagtctcatgctttaatctttaaaatttatgcaaatttagctttctactccataatataaaagtataaaaataatcctttaaactacttgacatagaataaaatttgagctccaggaagagctcctgtttattcttctcacatccctttctgctctgctgggtcccacactgggtgtctgcacacctcggttgtgaaggtcagcactgcactgtgatgcatctcagttaaattcttactaccagtttttgttgacaaacctttccgttaaggtgaaaactgtcacttggccaaaccacaaccatagaagtcatcttaacagagggtagagtccctaacacttcgtagacaaatcctaaattggtctttgttgatgcttcatgtagatctttgagtgacatcttgtctggctggaagtttagagatgatctaatcttgtggtttgtaaactcttattttttaggatccaaagtcatttttcaaatgaaactattcttggaactttaatttatgaaacaaaaaataaagacactctagtgatcattggggctgaaggccatgcttgtgtggtgtgccctcggctgagggtactccagggagtacagattctacagaatggatctaattcaaagcactcattttactgatggggagactgaagccagagagcttgagggacttgtctgcaatgacccaactgattagcagtaaggagccaagccggccaagtgcttctaagacccttgaaagtccttgaggttttcttgtcatttgaagaattgatttcctaactgcctttagaggtcctggaggggtcctggagggtttggacagggagtgtgcatgagtcctcctgataggggcctcccacgtgtattagcaccatggcagggtggcctcagtgtcaggagtgagactggtgccctgggcctcagagacagaactcaatccagactggtgacctgctgcacaagccacccacctctcggaagggccttgtagaagcttctctggacatgagcaggatgctctgtaacaaaagcctgagccctcccaagtgttgcttgaggcatgcatcctcaaggccaccacgcaagagttttggagtaacactagagctcaccattcccttctccacctcaaagcactgattcagtgttctactctgttcttcacctgactattgatttatctctgctaactctctatcattgtaggacttgagccaaagacatagctctttcccaagtgcatatagcaatttgaaaaacgactgagtgaggtcattgatgttgttaaggtgttagagtgtgttgggatccagggaaagggtttacagggggaagtgcaccagggccccagagaggacattgtccaagagctcagccaggccaccacacacctccacagccggagtgtggagggcatgtgggggccacataaagacctgctgagtcacctcggaaccactgctgaccccaggtttaagctgacttgtgctgacttatatgtgcgggccttattgagcacaggcttggcaatccccttaagtttcattttgattttcagagaacttgaagtgactattaaacttctataaagatatgaactgcttcacaacctagcattactgatatggtcatctctcttttatttttttcaattcatcagctaaacaccaataaggcctactagaagactgcccagtgtctaactccccaaatccctctacctcaggaggattttacagcggaagggaattaccccaccgctgcatgggataatcaaagagagaggactgtctgctcatgccactgtgggcatgacccttgctgccaggtgccatgcgtgctctgtgatttggctgcagaccagccccatcagtccagccccttgccagacagacacattgggtgattccatggcctcagtgtttgctcagcaaagagcgcttcaggcttgggctcccaaaattgtaccattggctctcatctattttaggccacatagacatggtgccatctggtttagcagttgtcaccttgaaaacctagaatccttatgccccaatcctctccaataacctctagacagtttctccattgcaccccatgaacacaaatagtgtctgcacaccactttgagggctataaactctacagcttccctgttgaatgtggctcattaacttccaaggtgatcttccagccctgcttattcattgtagaagccagatcttccaattgcatatatttagtctctactattccttttatctattgtctaaccaaacacaccaaatgtagtgtcatgaagcaaccaccattctattatatgtatggattccctgaggaatctgaaaagggcacaaagggatgccttgcccgtgctccacactgtcttggcctcagctggggagacttgaatggctggagttgatctgagcacctgggggctggaatcatttggaggcttcagaggctggcctcagttggactgtggagcagagcacttcggtgtggtctccccatgcagcttagcttctcacagtgtggcagatggctgctgagaggcagcaccccaggagagagcatttcgagaccaagtgttcctggagaccaaggagaagctgcaaggcttcttctgacctaacctgggaagtcacacagcatcacatccgctgcatcctattggttacaacagaatcacacaggtcagcccaagttcaaaaggaggggaactagatggtccctattgatgaaggaaagagagcatcacctttcaggaaagcgtatggggtgagagatagtgttatattcatctttagaaaaggcaggctgcctcagtccactgtctggccacgacagttcacaacccctcccacatccgaaatgcactctgtcctttcttgagactcccagagttgttcctgttatggcgtcaactcaaagtccaggatcccatcagctaaatcagatctggatgtggatgaggcaccttgaatgctgtttcttaggtacagttccctgatgatgcttcttctcaatctcagacctatgaatgaaagagacaagttacgtgtcccccacacccagcaaacaatgggtataggggatagggaaactgcagcagacattctcacttaacacgggggaaaggttggaatatgtggcacataagttaccaatctgtagcaattctgaagtccagctgggcaaatggcatcaggtccaattctagtttccgggagttgttttctgtggctcctggcttttctgccttttttgtttttttggagacagagtctcactccgtcacctagtctggagtacagtggtgcaacctcagctcactgtaacctccacctcccgggttcaagggattctcctgcctcagcctcccgagtagctggaattataggcgtgtaccaccacacccagctaatttctgtatttttagtagagacgaggtttcaccatgttggccaggcaggtctcaaactcctgacctcaagtgatctgcctgcctcggcctcccaaaatgttgggattacagacatgaaccactgtgctaagcctttttttttttttttttttttttttcataagagacaggatttttgctctgtcactcaggctagagtgcagtgatcacagctcattgtagcctggaactcctgggcccatgtgatcctcccacctcagcctccccagtagcccggattacaggtacacgccaccaggcctggctaatattttaatttgttgtagagatgaggtctggctatgttgcccaggctggtttcgaactcctggcctcaagcaatcctcccacctctgcctcccaaagtgctgggattacaggtgtgggccaccacacccagtctgattctgccttctgggtttttagttctaccttctgaatcatgttctcttttcataaaacatattctgtgttgtagctgagtagttctcagcctgcttcctgctcatagaacttgaagggtccaaaggattctttttattagttactgtctctgtttcttacagtccaggatagtgtaatttgttgaaaatcttaataggtttcttatgtatcaatttatcatccatttcattagacaaaaccatacccatgtgcatctttgcataagccttttcctactttgaacctttttgtggttactgtgatatagcatccttaagattcttttaaaaagtcttttgcgtatctaaaacaatctgtgaagcaccaccttaaatctttctgaagtcttaaagcagggttttacagttgcacagttggcctccttactctgaggctttgttttcctgccaatgccctatatttgatctttgtcatgaggccctttctaactttgaaaatattttattgagagtggttagaaatagctttatttttgaactctgcaagtcctagaccctaatttatatttactctaaattctgaatacaaactaaatgactcctttgttagctcatctgtgtatgcaccttaaaatatacagctaagagaaagcagctgccacgggtatttttcctagaagcctctttggctagatccatcagttcctcaggggcacttttcattttccacattcctgcaggcatcagttttgctcaactttccaccactgcaaaacaagggtgagtgtgagtgtcttccatcttccattaatgcctccctcactcttttttttttttttttttttgagatggagtgtttgtctgtcgcccaggatggagtgcagtggcacaatctcggctcactgcaacctccacctcccgggttcaagcaattctcctgcctcagcctctcaactatctgggattacaggcgcccaccaccatgcctggctcatttttgtattgttaatagagatggggtttcaccatgttggccaagctggtcttgaactcctgacctcaggcgatccacctgcctcagactcccaaagtgctgggattacaggtatgagccactgcgcccagccctcactcttctttaaactgtcatcaaatctccgccagccccatcaggcttcctcccaaaattcatgccacacatcttaggttttgttgtaccaccacctcactttcaggtatcaaattctgcttcagttatctattgctgtgtaacaaaccatgccaaacttaacagcatttgccaaccatcacttcattatgctcacagatttctgtgggtcacaaatttgaacaggatgctgtggggaataacttgtctggagcctcatctgcgaatacttgaatgacaaaagtgacttgagtggctggaggtgacttggctagctgggagctagaattatctggaggcgtcttcactcatgtgttggctcctgggttggaatgactccaaggctggagtcagctgggagagttgaccagagcactcatatataagctcttattttctctaactccttcctttaaaattttttttgttttgattgtttgtatggttttttgttttgtttgtttgcttgatgtcttactggtagaatcctttcttccatttcatttgaaatctattagagagtttaataatacatgtaaaatagagaagaacatcaaccgttcttgagtcccatggaataaaagtcaaaagttctaaagaatgaatagtgaaaactaagtctctctcctgcttgaccctcagccacccagatctcttttccagagacaatcctggttactactttcttgtagatagctacacatttacagatctttatgtatattcacacacacaaacatcttttattcccacaaaatggtatatacaccatgctgtagtttgctttttaaatttaaaagcaatagatcattccatatctgtatataagtagtgccgcttcattctttgtcatggcgtcatactattccaacagcatctatttatcaagaaataacccatcatcgtctcagaaaataacccagtgtcctctactaatggacatttgagtaatttcctgttttgttgttgtttggtttactattacatacaagcacatgtgtttgcatatgtattcaggtatttcaggagactctgcatctgccctctgagggaggttcctagctcagtcaaaggaaatatgcattttttttttttttttttttttttttttttttggagacagagtttcactcagttgcccaggttggagtgcaatggcacgatcttggttcactgcaacttccaccttctggttcaagcgattctcccgcctcaccctcccaagtaactggtattacaagcctgagccaccacgccctgccggaaatatgcattttaaaatttgatagatctagtcactggccactgaatatggaggaagagagggagggaggaagggaaggagggagggaggaaaggagagaggaagaaaagagaaagagagagaaagagaaagaaagaaatatagaaagaaagaaagagggagaaagaaaaagaaaaagaattacacagatatttccaaattgcctgcctctgaggttgtatcattttacactgctataagcaatatatgagataacatgtttgcttcattctcaccaatagtgtattagcaaactttttggaactttgccaattctgacagattaaaaaattatattgcgctgtagtttttatgtgcctttctgttatgagtgaggttctgcatcttttcatatggtattttcttttatgaactgctttttaaatttgtgcttggaagatgaaatgctgcccaaagatcaagctatatgcaaataatttagaaatcccaattttctgatacaggttttattctagttagctgtttttatcctaattaatatagagcgttctgcagggtgctacataagaatgaatctcccaggtttagtgaatgtttattaaaaagtgccccatcaattttaaggactgacttttaatttacaagtataaatatttcaaccctaatttggtaatcttcactatactaaaagctattatgctggaacccatgttgtcttattaaatgaattatttttaaattcaattcagcaatgacatgaatgaaacaattagaaagtttgaccatcaactggatattatggatatattacattttttagctgtgataatggtattgtggttttattttgggaaaaaggagtctttatcttttagaaattcctgctgaaataattatggattaaatgatatgatatctgaccaggcatggtggctcaagcctgtaatcccagcactttgggaggccgaggcgggtggattgctttgagctcagaagttcgacaccagcctagacaacatgacgaaactctgtttctccaaaaaaaaaaattagccaggcatggtggtgtgtgtctgtggtcctgtcccagctactctggaggctgaggctggagaattgcttgaactgggaaggcagaggttgcagtgagccgagattgctcgactgcactccagcctgggcaacagagtgagaccctgtctcaaaaaaaaaaaaaaaaagatatctgagttttgcttcaaaataattctagaaggggtaagtggataaatgtgtagatgaaatagtattggtcatgagttaataattattgaagttgaatgtggagtatgtggtattctatttctgtatctgttgaaattttctagaaaaatttagagagtcaacagataagtactaagtttgtattatgtgcaagacatagttccctgtgttgaagaaaatggacatttcacaagtgcacaggaccttgtttacttgttctgtactgtaagcccatcctgagacactgtacatagtagatgctcaatatgcacaagtcctggaatccagcccacacactcctgcccacagggctgctctagtttctgttcccactagcagcgaccctgatggtgtgctccacaagacagcaacagaccaggtgctatggggcttgaaggaagatgaagtcccattcattcagggatcaggaaggtgcttccgtggagctcatggggattgacattaaggtgcctgagacaaagaacacccgtcacatccaagacaatatttctaagcaaagtgaaatggccccttcaatttaacaggaagtatttcttttaggagcctgttagggagttgataatggtaatcaggagtcacaaaaccttacaacataaccagtcctcctctgctctctctgggcctgttttgtttacagtccagcataatatgaagcccagaaatgtgctgcttagtgaatgctgtctcatgaagaagaagaagagtagatggtgtctcataagaaagaagagaatcagaattaagaaatgatctaaggaaatatcaggaatgcagggtgatatattggtcctgtgggtatgtctgagtgatcacttagctcagaggctgaggaaatcatggttttaatgtttgcatgcaggtgttggtatagttgcctcagaatgagaagaaaaaaagaatttttaaaaagctagttacatcttgactagaagaaggctcttttgagaaagcatcaatgtcacattacaaacgccattcaaatctaccaaatgggccagatggttgccccaatactgcgtgctgccagctgcccattgctacagatgaagtcttttctgctgacgtttgtgcaacccacaagcacactatggagtgttgattcttttgatgctatttaacatgtatgtgtcatcgtaattataaaccataaatatacatgacaccatgcaataaataaaattgcccagcttccattctgaaaggggaggagattgtatttatgacctgagaagagagggtggctaatattcattttccattctttataaatgtcactcctctctagttggatgctctagatggctttattctcaccaagccttatccctcctaaacagcacagactcctggggctaataccttatgctaagtgccaggttttagagcaagcttggaccaaaagtcaggcagttacaattcaggggaatccaaatagttctaaattaagctaaactattttatttgacacatagcaaaagttctttggaggtcacataaacaggcaggtgtacgatgtaaaaggaagtaggtaaatggaagcgaatcagcttctttcaaaaaagacatttttctcaagatgcgtttctttttgctttgaaagaagctgattcagtgccattcacctattaagtaggcagcacatttatttgtatctgcatctataaagctcgagtgccttttccctctacaaaaagctgagcttgtgtttgtggggttggggaggggtgcagggggtgctaaatatcccacacaattcaggcagccacagatatataaatgaactggcggagatagaacccctgcccccgggcacattcagtcttattcaggaagacctgtttagaacacaacatctttatttcagaccagagaccccggagaacacgtttcatggctctataaatacaaggctcagatgcttcctgacacccagcatttctgctttttaacatgtaaataaatgaatgctcaaagcaagtaaatatctgtgtgttgagtttacaatcttgtctttcagaaatatcgacagtatatggcaggacttctggctcctccttatggtgttatggaaacgggctctaacaatgacagtaagtggaaaatgtgaacattttgtatctaaaaatttgtcgtgtggtatgtgttttcatgtgacaaaaaatatgtcctacaccagcttgtcagagtaagtctccagactcttttgtggataaacaaacctgccagctcacactggagatatttttaaagaaatggttaatatagtattagtctgtggtcttagctgatagagagaggtatgctctggtgccagctggaactttggcatgcatagaatactttcccaaaatatcttcatcttatagtgaaatccagtgttctttctgtgcccttttaaagaagggatgcacgaactgtatttgtttcagtcccatctggatacctgagagccccacctcttgcttttttttttttttttttttttactctattgatgaagaggagaagtggggtgagtcatttatttaatcttctaaatcatggcctcttccaattccaggcctttgtgaactttagatgctcttaccacacacacacacacacacacacacacacacacacacacaaagtgactatggaaggtgacagataggttaatttgcttaactggagtagtcatttcactaggtatatgtatatcaaaacaatgtgttgtacatattaaatatttttaatttaaaacatccaggccttttatgagagaccagtctctggctggtcagcaaagaaacgaagtttttctctgtggtattcttctctagtgggtccccactaaactcaaagaaacccgtatgtcccctgagtcttttgatctgttcatgcatgtcggaaacatggttagcgttcgttaccattgcatctgtgagtctccttatgaagctcttgtgtgtacacatataacaagattccaggtcctggagtctttggagctatagtgcttcagccagcagacccagtgatgcagcaggtagtccctgcatcttcagagccacagccagccacccttcagatcctcttcctggatcctagaattcccaccctccctcgctgaccagtcactcactgcaagagatctctctccctgcttgaccgcaatcctgagtgaacatcctcattttcctccccgcatttcactatttctatgcagcctctgccctgtctccccatttgccttctgctttcctgcagaggaggagggtgggagggacaggttcatccttcctttcctctcttgttcttgctttctttctctcctggctgagccagggatggctggctaattaaagcacctgagttgcaatcccagcaatgctgtcttctagctgacatctggcaaggcacgtagtctctctgtgccttggtttcctcagagggttgttgtgaagatcaagtgaatcaaagtatgttgtttcaaagggtgccaggcatgtaaaaagctcccaaatggcataggctatttcctcacctccagtcactcttcgacccctcaaagtctggattttgccccatacttcttgaataaaccactctaaagttaccagtgaccaaccaataaccagacctgatcattcccgttgcccacgtccagactccattccgccttggctcccggggcaccactgtgttatcctggcttcctcctctctctctggccactcacattttggtctcttccataggtacttcttcccccgcttatggaagagtttagccatggcttcttttctctttccttctccatactcactctcccctcttccatggcatcctttcctgcaactgatacaaacacttcccaaaccaacacctctgtttgatccttccaggggcagcctaagtttccaggtgacctcaggttctttttctacctggttgtcctgctggcctctcaagctcaaaatgttgataagggaacacattctgattcccgcaaaaccagcccctcctctggagaggccggtttctgacaattccattgttctcctcttgtgctgggctccaaacctcagccattttggactcctcctttctctcgccatcacccctgcttgcccgggcccagcgcccttcctttgcatgttcacagtcttcctttcagttccctctgcagccacctggccttgggcctcatctctttggattttagggcagagatgagtcaactggctgtgaaccttcactatctcacccttggtctagtctaggcctgatttccccaagacattttttactttttattatgaaaaatttcaaacatacagaaagtggagagaatgatacagttaacacccttattttcatcactttcatttaactgatgtcaatagtttaatacttcaatatatttcttagtagtaaattaatatgcattttaatattatttttgacattttttttcttctaatcacaatcacatatacacgtcactccaaatatgtcaccaggcatttttgaaaataaggactttttcatgtgtaaccagagcaccacaatcacacctaatagctggcatgattttccttagtaacatccgccacccaatccatattcaaatgttcccaaccgaatgtctttattgctgattgctcaaactggacttcagtcaagggccatgctatggtcatctggtgttatgtcttaaacgtcttttaatgttagacagtctccttccctcctttctcctgatcatatcactctgctgcttgaaacctttcaatgatcatccattgcctgccatggaaggtgaaattccaagactattaatgtcttagcccaactgtcaagttcctgtgtggcctcaaatcaccttttcagtgtcatttctctacagataccctaatttccagctactcatatatggtgatttgtgcaactgtgtatttatcttattgaacctgctagaaagtaagcttctgttatatcccataacctcatacaatcaaccctagttctttcagatggatgatggatgggtggatggatgaatggatgatttgggatgagcttcagagtgctgacctgaggccatccttcctctttctgacagacctgggaagtgatagcgagcctgttaatactctctgtttcagagaatagctcttctctgcctcttttctgactgcgtttttatgtcttgtgtggtcccaggtgtggatcaaagcttcaattagggaatgtttccaaagtctctttcatcctcacccctcctgcattctgtactactgcctactaggatgagcactcaggttttttgcttttttgtttttgtctttgttttgttttttttttagtcagggtctcactctgtcacccaggctggagtgcagtgacatgatcattgctcactatagccttaaccaaacctggttcaggcggtcctcccaagtagctacaggcatgcaccaccatgcccagctagttttttgtggagacaggcttcaccatgtcggccaggctgctctcgagctcctgggctcaagagatccacctgcttcagcctcccaaagttctgggactacaggtgtgagccactgcatccagctagcactcagttcttttaatgctgatactgtaaatcctgtgtagctccttgtgtaaaaacaaaatgtcctgtttactcagaatttggattattgtatttttttgttgcaaaccacctcatactgctccactagtttgaagataggtgcaaaccacatgtaaaaatgacctatgcttctgtctcctctgtataaggtcacagaacctcccagtgtggccacccttaccaggggagaagcctgaaggaggtaaaaaggaataggactgcctgtagtagatactcatgaaatgtttgtaaatcaatgacaaatgagcaaatggatgagtcattagccttctagctcggaacactgagatacccctggaaacagcctctgctgtgctcagacttggcttggagatagcaggaatttgctttgctcacaatggaagttgttttccaatgtctttcatgtgctacttgccccagcttcaaatcactagagccgagtggagtggtttgcaaagtaaaatcacagcatgtgaaacttaggagttaatgtgcctttccaaaattccgagtgttctggtgcctaaatcagtggaattagttgttttcatggtgagaatgaatcagtgatgggtatttacctctgtgaaagtaaaccatatggtagacgcaaaataagcctgggttttggtgtctgggcacatggccctgctcctgattcattgatttatttaagcagcattatataagtttttatatttctaagcagcattatgtaagttttcacggaaatgcaaattgaaaacactgaaattttacttggtttggttcagcaaaatttcaattccactttaccggttgattatacaattcatggcctctctctgtctctttttcctcctttagggattcctgacaaggagaacgtgagtagctactctctctgcctatcttctaaaaattgttataaggtaaaaaataatcatggtaaccctaccaacaaagagagctcttgacccacattcaacagagcaataaatatttttctaatctcattctggcatctttggcaagtcactttgaaatagaaaggggagaaggttgattgctctgacatggtcgtcacgtgtccctgattttaaccagtctgaagaaaggttattctaggggcaaatgctacaattgctaagtgttttctttttctgatgatgcatacatggcagtcaaacaaatcattagcctaatagcatatagaaaactagttgtttttccttagcaggaatacaaactatgaaattcagggtcagttgatgaatttgtctaattatatacaagtgcactagtgttaacatttctctttggaaactgaaaatgattaattgctataattgtttctgtaaaactgtattctttctgtaaaagagtagaaggtttaggacaaagatttcaccaagaaatagcaagcattccaagagtggtcatggtttagtggcatacctttgcatgcaaataataatagtattcattctattaactaacatctaaatttagacaacaacatggaagggttaacgataggagtatgcagtgattgattgggagcagtgcttggttggctttcagatgtgtcaccttataattgtgtcctttgattgctgtatccaagtggcaacgttacaggattgtcacctttgcctttctctgctttcggtcccatgtctgtgggaagatatactctctgaattcaatttagattatttccatatccgttctcagatatcagtctctggcttgctttagctcttcctcttttcatagtattagttttaaaaggactggttgggaattctagcccactgctataggactacaaacttgggaggtgggggttgattttggtttttgtttttttgtgatggagtctcactctgccacccaggctggagtgcagtggtgcaatctcagctcactgcaacctctgcctcccggattcaagtgattctcctgcctcagcctgccgaatagctgggattacaggcatgcaccaccacacccagccaattttttatttttagtagagatggggttttaccatgttggccaggctggtctcgaactcctgacctcaagtgatccatcagcctgggcctcccaaagtgctgggattacaggcatgagccaccacacctggccagacttgggtttaagacctagcagtgtcacttcaaatgttacaccaaaatttacttcgcttggtctggcaaaggtttcagttcctagctgtgtggtcttgcccaagctacttgatttgtctaaacatcctcatctcttctttaaaatgtggatgttaccttaaaaggaaattatgaatattgaatgagataatctgtggagaaagcacagacaagtagagtaggtaggctcagtaaacattggggctattaatgtggttagtattttctcaagtcttgtatcattttctagctactcttcacctctgaaaaatgtcctaccctttaataaattaactgtccttttgccttttatggctgccccttcttcagtgaaccttgctattgatatttaaaaaactttaaaaaaaatctttgtatgttgagtcaagctctagaaaatcaggctcataaagattctaaaggaacaaactgatcttgccaccattttggacatggatgtcccaaattatccatcctacaacaaataatacacaaatcatttgccaaataaagaagacagaaaggccttgtccttcctcatcaacagactatcagtgatgtggggagctcacacagaatgtccaagccctgggagggctgaaatgttctaggctccaaaaggaagtggtcgctcttgggcacccagtgacctttaggtgggatccccctgcagtggaacaacaggcacagggctctaagcagagggctaacagctgtcatcatgtagctcactttgtgacaaaataggaatttaaagtttgcagaacaatgagctcgtcagatacaatgaactgttagcatgttgttctgaaagatctggggaactggccaggccatctccctaatactagtagtagtatatatttatttgtatttgtctaggctattgtaggtcagattctatagcaaacagagaaccacactttaattctctattagcaaatagagtagatgtatcatcaccatgtgttattaggaaagctctccaatgccatcagtcaaagtacagcaaatgaaatgaaagacattcgtgagcaaagttgaagcgctagaaagataaaaagaagcttaagagccttaaagtggtgttaattgaaaatgtttatttcgtaggagacaagttgtattatgatgatttcttttatccttcagcttctttaactacatgctgggcaatattatattccccttatgtttcaaaataacaataatatgcctgtggactgaaataaaaacatttagactattgtttcagtgtccaaacagattatttgtagaaaaaaaaaattctccttcccagcttctcatcattttgttaatcaccatgtttaactgttttgtttttgtttttgtttttgagacagagtctcattctgttgcccaggctggagtgcagtggcatgatcttggctcactgcaagctccgcagtggcatgatctcagctcactgcaagctccgcctcccggctcacgccattctcctgcctcagcctcctgagtagctgggactacaggcacccaccaccatgcctggctaattttttctatttttagtagagacagggtttcatgatgttagccaggatggtcttgatctcctgacctcatgatccgcccgcctcggccttccaaagtgatgagattacgggtgtgagccaccacacccagccaccatgtttaacttttaataaaatatgcacacatcaacaagtgctgtttgtggctgccttgccagctacattttattctcagactcaggcttaccttgcacaaaaataaattccttttcatatattgcacctttgtaggaataaatggatgggcagctacttgctggattattttgtctactatttattataattgatggagacatcatttaatgtgagataatacaggatgctggaacctacaaaatatcaagaaaaatgttagaaaaacaaccacgcagccaggacacatagtgagactctgtctgtacacacacacacacacacacacacacacacgctgaatgtggtggtgcacacctgtagtcccaggaagatcagttgagcctgggaagttgaggctacagtgagccataattgtatcactagacaatctatcctgggcaaccgagtgagaagaaagagaaagagagaaagagagaaaggaagaaagaaagaaagagagagagagagagagagaaagaaagaaagagagagagaaagaaagaaaggaaagaaggaaggaaggaagggaaggaaagaaaagagagagaaggagaaagaaaagaaaggaaagaaagaagaaagagagaaagaaagagtaaaaaagaaagaggagggagggaaggaaggagggggagggggaggggggacagagggagggaagggaggaaggaaggaagggaaagaaaggacggagggagggagggagggacggagggagggagggagggagggagggagggaagtcaggcaggcagacaggaaggaaagaaggaaagaaggaaggaagcaaaaccttggagccaataaagcaagttgattattttgatagggttgtgattgttaaaggaattctctttgatctattaaagttgtatttgtttctgtcttttatatgtgctatacctgactgactatgtttaacactgaagttaaaaatcacaatgataagaaagcttgaatgttgaatgctgaatgttacagttgccctttggaataatgaccctgtctttaatttttggctacttatgcagattgtgttgcttattgtgctccatacttctgaaagggcaactgctatggggtttcctagttttagaaggtaatactttactttagtgtggaaggagctggagaagtagactcacggagatattacaacataatctcatttcctaatttataaacatcttgtttcccagaggatcatctggggtcctcattttttgtgagttttttgtttgtttatttgtttgtttgtttgtttttcaagatggagtctcgctctgtcaccaggctggagtgcagtggtgcaatctcagctcactgcaacctctgcttcctgggttcaagtgactctcctgccttagccttctgagtagctgggactacaggcgcgtgccaccatacccagctaatttttgtatttttagtagagacaaggtttcaccatgttggtcaggatggtctcgatctcttgaccttgtgatctgcccgactcagcctctcaaagtgctgggattacaagtgtgagctaccgcgcccagcccgaggtcctcattttttaggcagttatagtattgatagtatgattaataagctttttgctaaatactgaagaatgctttctcgctataaatcaccatcaatgtggagctcaaagttgtttcccaagtgctagaagaattcctgctagtaattagtaatgacccagcctggagatcatctcaaaccacttggcaagtctcatcttaaggagattacttaaagcaggagtttctcaaactttaaaaactatgggtcatttatatgaagaataagttttagaaattattataaagatgtaaggtttcaaatggcaactagtaaggaaataagtttcacagtttgtggaaattctcattaagggaagggcagtagaataataagaaccttttgactgtgagggtcaaaaggttaggaatttggggaatttttagggaatacaataacatttatttaactttattgttgctcttttttaaggttagagagaacaaattagaatattttccacctattatatgacaacattttatcactacagactggctaagacaatgaaattctgggccagataaagaaataagaaattatgtatcctcatacaaacttaaaacattaaaaattcagataattgatggctcatgccagtaatcctaactacttgagaggctgaggcaaaaggattgcttaagcccaggagttgaggctacagtgagccaggatcgtaccactgcactccagcctgggtgacagagtgagaccttgtctctaaaaaaaaaagaaaaaaaccaacaatcagagataattccataaggctgtataaaccctttcaactccacctttcgaggaccaactgaattcaaactgttttctgtggaacacagtttttaaaaccctgctttacatgattgatccaggctgaacctatgaagacaccttggccagtgtcaccgatgttcccctagcagttgtgtccctctgctctagggtaccagtggcctcactagtgccattaccgttctgaaactcacgtgtaactggccagggtacaaaactttaataggagagtgaaaccacaaaatgctgaagctttgaaaatcttgagccatcttgtcctgattttgaaggacacattgcttatcacccaaatgaagattagattagcagtgctgctggcccaatcctgtgagctgtgtagtgtgtaaatactcctttcattagctggcctattagaaagcgtaacccccgagccaggacttattttgccccaccttctagaaaataccgtgacttcatgttgaaggtgccaagaacaacttcagctctccagtctctgaggaaatgtttgtttttgtacttgtgagttatgcattttatggggcagactgtcgttgctgaatttctttctgctttttattccatctgttcctcaactcttacaaaagctagccataccatctctctctctagcttctgaagtggtaagctaattgcatttttaggaatgacgtgtagttgtcatccatctaaatggtaaataggaaatgtaggtaatactctagaactctgatccttctgttgtcagttatgccgtgtgttggttgcttttgaatgtcctggacattgttcctaggacctgcttgccgtgagtttgttggtgaaaggagatgtattggggtgatgattcattgctatattttagaattatttttgtaatactgtgaattacatttggtgattgttttaatattctatgtttggtttctttgcaatttttaaaatctctcttatgaaatagaactttttaatgctgccgccatgctgacgattttctagggttgcagctgagatatactgcacggccctgctttgaatatgctccctccatcttcagtcatcagaatttgatttggcaagctatcccagataacctgtgtaatgttcgatagtttaataataataataaaagaaatgagtttctctttggccaacagcttcttcttgctctcacttaaaacatttcacagccttgagatgcagctcagaattgttccactgtcagcagggagggaggagtgtgatgtcatgttattagtaatgtacacagctgctgcttccaagctgtgggagagtatattgctgtcttcagagatattttctcctgtactgaaggcaattatcgtcatcaccagttactttgggctgctagcatgttatctcaattaactgtgagaataaaatagatagtatcccttatgtttgatgtgtttgaatttttattgttttgagaaactgagaacaaattatttgcaaaatatgtcttatggttagcagaaaaaattatagtgttctcagattggataaactaatctagtgttgacatgtcatttagggtttagattctcttctaccaacaattctgtgtcaggcaggttccctaagtccacagatattaaatattccgtagtcaccctctttacctttagatgacattacattgaagacagatgacagataaatgcacatatatatacatatacacataatatatatagacacatacatatgtatttgtacatgtataaatatgtatatagcaatttcaattctttaaaattttcagaaaagaaaatggtcaaatcacctttactaatatggtccagaattgttcagaattcctattgccagtttttataaatgtctaaatcctttttagtttaatttagttttcttttctatttcccttcagccaaagaatgactcagaaacacccctggaatataccactgcttgcttgaaaatcttcaatttaatgaacatttattgatcaatctcaggccgtcatataggactatgaaaatatggcactgcagcctagacagaagcacacgtgaacaaataagaacagtgaagtattgtgggtgctcatgtcatcagggtagtgtggcctcaggacagggatttaggagctcttagggtttcagttaaactcccagctctgccaatttctaacatgggaacatgaacaagttacttaactgccttactcatttgtttcctcatctacagaaggagaataatagtagcatcttgcccagggaggtgttcaagagtattaatgagataatgtatgccaaggacttagccagtgctggcctctagtatctgctttgtggagacacatagtggggctgtgaagttcttgttaagaagaagggaaagggttcaaagtagccccacagaggaggcaatgtctgggtgggtgctacccagggggaaggaaaacaatatgccaggctgatagcattgcatgaacacaggaaaagagtacccgaattttctcttctgaattattttgggcactcttctttctaaggatccctttcaaagttataaaaacctggcttccaagccataggcattccagtgtcccaacaagacaccttcctcacccctcctcaaagagcttgatctattttgagtctggagggggaattagcttgagtttccccctattttacttctcaaaatcatgccttcttttttaaaatacagaactagcttgagtttggaggctattgttcactctgacctccagctccttttccgttataattacccaatcaatactccctcatttctgttgttctctttgtttgcccccctcttttgaatgaattactttgcaaagctttctattgaattttgccctctttttccttttctgtttgtcaaggtcattttaaatttcaaactagctctcctaactgccagccacccccactcaattgggtatcattgttaaatttgataagaatgtttttgatttgattccatattcaaggcattaataagcatgttaaatttagcagcattcagcccagtacctaagcctgtgggattcaatttgtttgtgctaatttatttgcatacatgatttatgatcaccccatccagacataaaagaaacttgggaaaacataccatgaaaattctgggtaaaacaagggctaagtcattgaattcacttctgtcatgcttttcactcaattgtagtttgagggaaaaggaagacaataattttctttctgtctccaaagacattagtatgacggggttcaatactcattcattgttacaatccatgtccctagaagcgcatgtttgccagttcccatccctgacacttaatagccagtgacactgaacaagtcactcatttccaggagcttcagtttcctcactggtataatggtgatctgacttaccacaataaaaggattagtaagatcaagccaggccggggtggggggggggggcgctggggggcggggggactgaacaggtgggaggggattccaaaactcgacaacgatctcaaatagaaaacattctattcagtttacatggagcgtaattctagataagatcacatcctgtttctatagcctcagtcccaggatatttttctagcttgcggggagctctctgaggcaggcctgtgggttctggtgtaagtggagattgggcctggaaagccttagagaggtgctcttgcttcctgttggcacttggttcaattctcagttctgggaagacttcaggacaacaaatggaaagtcattcatcttaccgtccttataaacttggctcagacaggagaatcagaaattcccaagtcacaccaagtgctcctctggtgctgtaatttgatagcccaatcccaaacaaagtgaggaagccacacccaaaccttcctccaaagttaaccacaaagatgaaccggaatagacagtgagagcaggaacacaaagataagctggagaaggcagctggcttgtttggggcacatcggagagtcatggatgttatcacagcagcccacccaggacctgctagttttaggttatgtgagattttttaaatcttacgtttaaccaattctccttttataagtgtcaaagcattgcagtgtacagctgcctagtaaaaggatttgtaacatagatgcgtaaatggttctgtcattcaataatatagtctcttaaataactgaaacaggtaatgcttccctttccccttcccgccactcctcacaccccttgactcccatgcgccccccacccccacccccatgcgcccacccccagctttatattttgtgtgtgttttcttcctttttctcaatttggtgtttggcatattcagaaaaacacgtgggctccctctggtggtcattccggtgttcatgcatgtctaaccttcaagttttagttacatggcacaagatatttggatgaaaagtggaaatattcgtagtaaatgttattttcgtttgtaagattcctagtacttggaaaccaccaaaataaccagctcattcactcattcatccattcatatgtgcacatatatagtcttccattctcacatattgttgatatttgactttgctaaatgcagcatggtctggtctgcaagtccatacagaacaattgagttccagtcctgtaagttaaacaaattttctcaaggaatggggctgttaatcagcgagtttttatggaatgcatacagtgtattagaccaggcattgtgaaaaataatttgttgctcaccacttaaaaaaatatatgaacaagctttttaatagttacaatgttatattatttccttttgttgtttaagtcatattcccattttatttcctctgtagaaatttattctactgtaacatattgttttccaggccagacgactttgtcatccagattcagctataataacaaagactcaaacacaacagcatcttaaatagatttttttttactcatgttaactgtccaaatatgagctgcccagggttagtatggcagcttcacgttgtaacgtatgtttgtggttgaaagtctcttatggatcaccctcatactgaacatgtatcaaaaatatgtacttacatttaaatattcgtgttttaaaatctcttgtgaccatgggtctttgttacaacttttcttctagattgggttatgacaataagtagatatatatgatcatcaaaacaaaataaatattttataaatttctgtacaaaaatattaaacattaaagtaaattactattagaaatgcatcactgggtgactttggcaagtgttttaaaaaatgaattattttaaaaagtcaattcatgcacctttaggaaatagcagtttcattcttcttcttggtttttatgtatgcaagcactgggaaaactcattcacaaaaacaggaagctggggatggaagtagttttaagtaacagtgttactaaattctttgaatcctaggaaactcatgtgtacttcatggaaagctagagatgatggtggagttgcagtggaggggtggaaagtgttgcattctagatggattttggaaatagagtccataggattttctgatggattaaatacgaggtaagagagaaggtactcaagggtgacttcaagggttttggcttgaacacgtggaaggatgcaactgccatcaaccgagggagggaaggatgagagtagagtgagtttggagacctggtttcaaggtcactgtactgggcagtatccaagaatgaagtgtaattagattttgcaccgtacctgggtgcagtcaatagctaataatgataaacattagactagagagtgataatgagatagatgatagggatttgcactgagtaggacatgcccggggcatgaatgaaattaaaatgtgtctgaaagaaatgaaatagtgagacataaatcagcaagaattttatcaggtttgttttggcccctattatatgttatatatttaagatcatttatgtttataagttaactctgtatatgctttcaggtttcaccttttaaattaataaaaggttgatttatgtaatatttcaagtaaaaacagctaagtgaaccaggctaacaaagcattatttaatagacatcctcagggacctaatttaatgaataggtagagggatgttatttgtaacttagttcacaaattatttctatatcaataggtgactttaaatggctatggcctgcttgaaacaatttattctcttaattagtttaatcattctttttacagtttcttacactactaaatgggttaataatcccctttttcctcgagtaaattaatttttctagcctagtcacaaatttctaattaataaagtttgaaggagtgaggtaattttgtaatagtagaaaaaataactatattttatttaatccttttttttttttttttttttgcgtcagtgtcttgctctgtcacccaggctggagtgcgatggcgcaatctcggctcactgcaacctccacctcccaggttcaagcaattcccctgcctcagcctcccaagtagctgggattacaggcacctaccaccatgcccggctaatttttgtattttttagtagagactgggtttcaccatgttggtcaggctggtctcgaactcctgacctcaggcgatccacctgcctcagcctcccaaagtgctgggattacaggtgtgagccaccacgcccagccctatttaatcctttttatattaactaacatttattaagtttctactgtgtgccatgtaggctctggagatacaaagtccaaaaagtccaatgcaatgaattattgatttcaaagagcaaaccacctaatgggggagagagttaggtaaacagataattatttcagaatgtggtactgagagagattggagttaagtaccaaaataccaaaatacacactctaagagccttgtcacctgaaccggaaggatttctgagacaacagtgtttcatttcatctgttatggttgcagtaaaaaaaaaaaaaaagtttcagtattcaccccctaccccaacattctccctcttcacaaggctacagaattattaggttactatataactccagacttctaagttacaggtggcagaaacctggatcaagccacctcgaaagcaaacaagaggccgggggtggtagctctcacctgcaatcccagcactttgggaggccaaggtgggaggatcacttgagcctaggagttcaagaccatcctgggcaacgtggtgaggccctgtcactacaaaaaatacaaaaattaaccaggtatggtggcacgcacctgtagtcccagctacttaggggactgtggtggtaggatggcttgagcctgaagggcagaggctgcagtgagccaagatggtaccataacactccagcctgggtgacagagccagaccctgtctcaaaaaaaccaaacaagagaggaaattgggggctcacagtggagccggccttgggctgatgggagccgagggctctacctcttattgcttcttccccagcctagaaacatggcaaccaacaactcctggttcctccccagcagccacaatgagggagcataggggaaggactctggctggcctatggtgggtcacatggctcccctatccccactctgagccagtgtaggtgggatacacagctctgttgatggggaggtctgtgcccagaaggaggaggaatgatgggaaatgagagctgttcattgcttctcgccagtgatgtgcattccgctgactgccaaaaaaaaactgcccccttcgattgatgtactcaaataacatcataatacaatcaatatctcatttcaggctagtcttcatgccttgtttatgaagaagttggacagatgcacttatgaaaataatgttgacatcacattttgcagtagctgtgattgcagtgagcattgtgctttagaaagtccatgcattccattcagtcagaatcaaattttcttttgcaccgtcttcttaacatatatgatgtggagattaacaaggtttgatcttaagtcttttgagctacttagatgtggatgctccaacagtacatgacataagcaatctcatttttcctagaatattacaggaattcttcctttttaatctacatttttaagtctttaaagtctgtgagccaaatttacattcagataagtcattgatatttatactttgtgcctaaaaggaggtgtttctgccaagagtctaaaatgaagtctagcaagatggtggattttaaaaaataatggttatctctttctgatcataaatataatacttatgttgaatatttggaaaaataagtgtttttaaaaatcttcctcatgcctgtaatcctagcactttgggaggccgaggtgggtgggttgcctgagctcaggagttcaagaccagcctgggcaacacagtgaaatctgtctctactaaagtacaaaaaattagccgggcatggcgtgtgtgcctgtagtcccagctactctgaaggctgaggcagaagaatcacttgaacccgggaggcagaggttgtagtgagctgagattgagccactgtactccagcctggacaataagtgagactctatcccctgcccaaaaaaacttctgtaaatgctacctcccagagctctgtgtgtttatatagttaacatataggaaaatgtatacaaatagaaacaaaatttagtttacactgtatatatagtttcatattcttcctttttcaattaaatttttttaaggatttttaaaattagttaatattgtctcaaccgtaatgtagaatgaatttcctctgcaatacatttttattgttttttttttgcaataattttttttaaatagctatttgtaccttgtcaaagttacttttcataccatccctgtcccattactggaattattttttgttatattgctgttgctcttccttcgttcctgatgttcctagttttcctctggtatcatttctcttctgcctgaagaactttttaaagaaattcttttaaagcagttgtgatggctacgaattctaaattttttctcatctgagagaatctttaatttgtctttatatataagagtattttcttaatgaacaaatattgattcattatcaccaactaaagtccatagtttaaggctggatgtggtagctcacacttgtaatcccagcactttgggaggccaaggtaggaggatcacttgagaccaagagttcaagaccagactgggcaacacagtgagactcctctctctgcaaaaaaaaaaaaaaaaaaaaaaagtcttttttaattagtcaggcatggtggtacctgcttgcagtcctacctacttgggagactaaggtaggaggatcactcgagcccaggaatttgaggctgctgtgagttatgattatgccactgtactccagcctgggcagcagagcaagaccctgtctcttaaagaaaaaaaaaagtctgtagtttatttagatttccctcatttttacctaacatcatttttctattcgaaaattctatccaggacaccacctcacattcagtcgccatgtctccttaggctccttttggctatccatttctcagactttccttgttttggatgactgacagttttaagggatataggtcgggtatttggtagaatgtccctctattgggatttgtctaatgtttttctcaatattagactggggctaggggtttggggaagaccgtattttcatcacatcatatcaagaatatatactattagtatgacttatcactgttgatgttgaccttgatcatctggctgaggtagtgtctgcaagtttctccactgtaaagtcagtctcccacaactcctgccccgctttccatactgaactctttggaaggaagtcatcgtgcacacagcccacacttaaggagcaaggagctaggctccagcttcttgatagcagaatagctacattgtttggaattcctctgtgagggggatttgtctcctttcccatgttgattggtttattctgtcattttttttatatcactatgcactcatggatatttattttatactttgggttataatccaatactaccatattaattttattgctcaaattgttccagctttggccactgggagctctttcccttggctcctgtattcctttgacacactcccatcactatgctttgttttattttgttttatggagcactgccttacctgtggcacaactagttgcatatatattctcggctctagtcccagagtcagccattttgccaaggattcttggttcctttgatgaaagaatggtgttagcaagatcttggcgctaggcgtgctgttgctactaggatatcttaagccctgtcatctgagatagcaaggaaatacatgtgtgcatcctaacctgtgcatatacacatatctgtaagtacacacacacacacacacacacacacacacagacaaccatctgtatctatgtttggctaagcatgacttcatactgatttctccaactctaatccattaccacatggatcgttctagtcctttctccttgcctctttgtaacctcccactcccaacagtgagaaatttggcttgtaccatctgccacctatttatttaactgtctaattcgcatatacatttacagtggtttaaactgtttgcctgggcccccatgggaaacaaatgttatcaagtagaatagagcactgtgtgcagtgtccttgccttcagtctctcacgctccactcatttcttaagtcagcaccttcctcacctgcctctgctctgccactcccttcgttgaagttatttcatacatttattatacagtcaaattattttgtcacagtatgcattccatcctgggataccctaaccttctaaatgatttttagaatttgcatatattaagttttactccttgtgctgtaaagttatatgagttttgacagatgtctagtgccatgtatgcaccattacagtacagtatcatacagaatagttttactgccctaagcaattccctgtgctttacctatttaatcttcttccgtgtctgaagccatagaaaccacaatttgtttactctcgataaagttttgccttttccaacctgtcatataaatgacatcatgcggcatgtagcctttcacttagcaatatgcacttaagattcaatgtccttgcattgcttgatagtttatttcctttatcactggatagtgttccattatataaatgtactacggtttatttatttattcttctcttgaaggacatcttggctgctttcattttttggcaattatgagtaaaactgttatgaatatttgtgggcagattttgtgtgaacataagttttcgaatcagttgggtaattcttaggagcacaattgctagattgtgtggtaacactatatttagctttgtaagaaactgccaaactgtcttccaaagtggttgtaccattttgttttcccactagcagtgaatgagagttcctttgttctgcatccttgccagcttggtattgtcagttttttaaagccattctaatagatatgtagtggtatctcattcttgtttttaatttccatttccctaatgacagatgatattgagtatcttttcatatgctgtttgccatctgtcttctttgttgaggtgtcttttgcccatttaaaaaatttggttcttttcttattgtttggagaattctttgcatattttagatacaagtcctttatcagatatgagttttgcagtccagtctgtggttttgcttttcatcttaacagtgtccttagtagagaagaagtttttaatttcagtctagtccaacattcattttttttctttcatggattatgcttttgttgttgtatctaacttatcaccaaactaaatgtcatttagattttcccctgtattttcttctagaaattttatagttttgtgttttacatttaggtttataatcatttctgaggtacagatgtgtgtataaggcataaggtctgtgtgtagattcattttttttagcatatgggccatccagtttttccagctccatttcttgaaaagactgtcttctctccattgaattgtctttgttcctttgtaaaagatcagttgactatgtttatgtgggtctatttttggacttcacattctgttccattcatctacatgtctgttcattcaccaatatttcactgtcttaattgctagctttattataattctcagactttcctagtttttggtaactatgacagttttaagagatactggtcaggcattttgtagaatgtccctcacttagaatttgtctaatgtttttctcaagattagactaggattatgggttttggggagaagaccaccgagttctactgttttcatcacatcatatcaagaattcctactatgagaatatatattattattgaaattaggtagcatgagttctccacttttttcttctgtgttgtgttgactatttgatatagtttggatgtttgtccttgcccaaatctcatgttgaattgtaatcccaatgctggaggtgaggtctggtaggaggtgattggatcatgggggcagattcttcatgggttggtgctgtcttggtgatagtgagttctcatgagatcaggtcatttaaaagtgtggcacctccccacaactctctgtcccttgttcctgctttttccatgtgaagtgcctgctcccacttcaccttccaccatgagtaaaagctccctgaggcctccccataagtagatgccgttatgtttcctgtacagccttcagaaccatgagccaattcaacctcttttcttgtaaattacccagtatcaggtatttctttatagcaatgcaagaacagcctaatacactattctgtctaggtcctctacctttccagtaattgcagaatcagtttgtctatatatctacagaatagattcctgggatttcgattgggattcattggatctatagatcaagctgagaagaactgacgtcttaacagtattgagtctgataatttatgaacatggaatatgtctctatttagatgttcactgattttcttcatcagtattttgtagttgtctctatatatgccctgtacatgttttgttagattaatacaaagtactttattttggaaggatgatgttctaagaggtattttattatttcaaattccagttgttcattgctgatatgtggaaaaacaattggtattttgtacatgaccttgtatcctatgaccttatacttacatattagttccaggagttctttggaattttctacgtagacaatcatgtcatctgcaagtaaagacagattgatttcttcctcccaatctgtgtgctttttctttatttctcttgtctcgttgcacaaggtaggacttccggtatgatagtcaataggaatggtgagaaagaatacccttgctattaggtttttaatgtaataatttttaccttatttcttaagtcttccatgaagcattatttgtaatggtggcaaaatagtccttaattctggtgcagcgtcatttattttaaccatttgtataatgtatattttgattgtttctaatttgactattctttagttttattattttcacgataaagatgaaaaatattcacttcacgaagttattgtgaaaaataaatagcataatccatggaaagttcttattgccacgtctgacaaaaagtaagcacttgataaaatgctttttttcttatcattattaaggcttttgaaaaatcagtgattaggggagttagggtagaacctgtgtttatgggcagagatttctctttacactttctgaggaaactgtattacggcagtacatcgtaggagtaaaccagcaaggagactgcaagctgactgcttgagctcaatgctggccctgccacttcttagctatgtgggcttgagcaagttacttaaactaagactcagattcatcatctgaaaaatgggttgataataatagaatctacttcctcactttgtcctgaggattaaataagaacacgcatataaagttcacacagcacagtacctgaaacatagtatgctctcaacaagtatttttttattataaacaagataaaattgattcccctcatttacatctctggtcatatattcttttaatggtgctttgcagttttcagagagtttaactgacaaataataattacagatatttacggagtatgatgtgatattttgatgtatgtatacaatgtggaatgattaaatcaagctaattaacatatccttttttgatgagacatttgaaatttactctcttagcaatcttgaaatatacaataggttggtgcaaaagtaattgcagtttttgcctttaaaagtaataacaaaaactgcaattacttttgcaccacaattacctaatattaactggagtcaccatgttctgcaatagatctcaaaaacttctggtaatatatttttaaattgtcttagctcaaattcagaaccaccatctgctttcttcctctctaagattaaaggaccatgttcatattttgctaaaggagacagcattttgctgctccccttttcctaacggatgtccacctttaatgagcctttattgtttcaacaactccatttagccacgctatatgccaggtgcctcaacactggagtaccaggggaatcagacaaacatggtactcctgcttagatcttagagtctggtaaaaaaaaaaaaaaaaaaaaaaattcagtaaccaagtaattataactgtaatgtgtgttaccaaagggaagtgcagaatgctctgtcacagcatggtccagcaaaaataggatgcaagatacatgtgtaatttaaaattttctagttgctacatttttaaagagtaaacagaggtgaaattaattttaataacgtatttttatttaacctaacacatccaaaatgttctcatttcaacatataaccaatatattaataaaacatgttactgacatattttgcatgctgcttcttgttctccatcttcatacttgggcatgtgtttgcatgcttacatctcacttcagactcactgtgtttcaagggctcagtggtcacatctggctggcggccactgcactggacattgcagcttcagaagtgtgtattagagggcttgggaagaactgtctgaggaaggtacattttggtgtggcttgaaggttggggaagtcaggaaaagggaggggaacacacgttttaggcagagggaacagatggggcaaaacctccaaaacaaaagcgtttggcatatttgagaagctaaaaaggaagaagggagccactgaggctggagaggcaggcagaggtgatgttctgaagagactttgaagcagtggtaaggagtttggatttgttcctagaagaatggggaggcactgtgtataactagaaaaatgacatgatcagaatggctctttttagagaattgcctttactttaaggggaaggtaagcaaggactctttcctcagagggcagcagacagtagtgcaagtggttaaccagagagttcctatcccagagctgccagtttcctcatctgtgaaatgggagtaatgggagctcatcaaagggttgttgttagtattcaataagataactgatgtgactcacttggcacacagcatttgataaatgtttgttcttacccttgcctgagcctggaatagtctcttataggagaaatccacaaaccttcctttgtcttcagaacatacttcaaatcttgggcatccctgcctctggattcctgtgctgaagcaccctaaacaaatgagataagaatggaatggctttactcctaccccacaacccaaaatcagacaagaaaaccctttcgctgtcttgcctttcacccgctgtttttgcttgcatatgcgtttgctttcataacctgagaacagttgttgcatgaaccacatcctctcagagttttctctgttctatatcttcataaaggttcccacatgcttcttctttaaaaatatggtaagatcactgaggttaacctcctaatgataattagggagaaatagttctccaaatggctacttgagtaagaagaagcaatgacattaccagataataatagatcaattatttatgggatttgcaaacagtcagtcacctaaggcattttacttatgaaattttaaaataaaaacacttaatacatagatattaaatcacatggaacaggttttcctcacttctagccaaacacacgggaacatcttaggctgccttctgctccgtccttccttctgttcttggtaaatgcacccttggtaaatgcaggctgccagtctgcatcctgggaggagcctcactgtagaaaaaaagaaggaaactgacaggtctcaataatccctttaggtttatgcgataagacagtcatgtattgaaagttctgtctttgtttggaagagatttgctttaaaatgcagcccaccattttgaaagtcctaaggggcagaaagcagagatttgtagtgtttccatgttaggtagagatagaggcaagaaaacaggtaagcagtggagtcctcttattatcttgggcaagtgcccagggtgagcctgtgtcctagcacagcgagtcatgactgactaccttcccacacttcggctgtttctgtttcatggctgcaaaacccaacacttccagaatctggagcctcacataagggaagcagatgggattgagatacttggagatttctctcaaaacaggctgatcttagagtgattaaccccagtctgactgaaagctttaatcaaggggctgttgtagctgtgtcatcttcagctgaacatttcccctttctcgaagagatactgtgaaaatctgtcctgagggtgagctacaatcctcgtcgtacttccaaaaaaaattatgtccacagtttaagttcctagtcaataaaagaacacaagaacatttgattccttctcattgtacttgcagatgttgcaagtatgtctaaacctttcaagttactttgaataaaaaaactgtgacctccaggtagaaatgccaggtttctaaagtatgcgtgagcctccatcagctcattattgtgggtttttttttcttcttatacacattcttggaaattagaaaaatacagaaaggggaagggaggaaaatatgagtgaaatcaaattttagaacttaatatatcatgctacttatttctttggccttttagaatactgttggcatatctaattgaaaccatcatctgtactagggcaacttgatgataaaagaaaacaaaactatgtttagggaacctggtttatgaacctgatctgaaatgaacttgatattttatgtagtatgctacttttctgatttgcttccatattttatatggtatgcttttaggactttgatcatgtttgttttgatgagccttgcaaaggcttaaaaggtttcttgaaaacatcaataggtttttgctattccaggaattttgccaaacctagatcaaatatactactgccctcaggtttctgagtccttaaaggttatcagaattatttgtttgtatattcttgtcctgtatttgtactaaaattatgtttattgtagcttttgcctactagattgtttgaggtagaaaaaagtcttttacaattttcaatcaatacagataaatacgctcacatgcagaggactatacaaaagtcaatcgagtgcattatttttaattcaaagtgtaggacaaagacctttttttcatggtaattattttacctttcccaactgggagttactatgctattaaaataatggcctaaggcagtttacatagcatgcatttaaatattaagagaatctatttgtgtttttctgttggacatttttgtcttaattgatctatttcttccacattaatatgtattagtcttaataaagacactggctatgttcaagtggccaaagatagaccacttttctaagagtttattcagaagaaatatctcatccaaagttaccttcaatgcaagcttcacaatttgacaatgtgcatttggaaccataatccctggcctgggttttctacttcagggaattgattctgagaagataattccaaatatgagtgggtaaggggaacttttggcctaagtttatagcatattaatactactagcaaatcattaaaaacttaaaggcacattgacaaaaaaaatgttaaattatgctgtatacatttaaaggaattttgatggttacaaagagtttatagcaacatgtaaaattgcttatgatttagcattatgtaaaaaggaaagatacaaaattttatataaagtatgattacacttcagttaaaaataaaacaaaacccacacttagaaacaggggctgaatattaatattccaaaatattaacacaattatctttgactggttggttttggaagattaaacttttttatactttccaataagcatgcattatatgtaatggaaaaataggaaaaggtagaaacctatacctgagtatatgcctttactacaattgataatctgattctctgtatctattcttaacaatggtgaatttttatcatcacatatactgtcttcctacactttctctcacctcctcccaactccagctgtaggctacagccagactaggggactcacaatgccttaaactcccgtctgtgtgactttggctccagcctgcaattccatctgctctctcactatcaagccctgttcatcctaaagaccctgttcaaatcccacctcctctgggaagattccttgaaccaccctggacaactgttgctcttcccttcttcccccaacacaaaccttctgactctataaaatacttgtgtatatgtaaaacggttccaccggatgtgcctttcatcattttgggccagccaacagaggaggcatgggcatccctctgaccttgagaagccccacctgctgatttatcagtgctgacactgacaggtgacaagtgggtaacgactacctataaaactgtatgcatttttctgactgttcattaccttaacttaaaaagtcaactgtagagattctgcaacatgtatcattaaatgtgcttcacttattctgaatttaatacattgcctaaacgtatttgtgaaaatttctgagacttgacattcagcttgtacctccagaagcctctggttgtctattgacaactgtgtgttgttaagactcaaatcattgggcttcctaagggttaaatctaggaagaatgtgatcatgttatatttgcaatgaaatatgtgaataaataggatacattaatattttattccatgatctgctaggaaaatatatgctttggcaggtacagctagtatttaaataaaatagctgtaaaacatttaataacatatggacttcaatactttttttgttttgatttttcctgtgtttacatacttttgagggtgttggtggtgttttacgtagtagtagatagttgacatttgcaatcagtattcttagacatttccagaatcgctgaaggaatgaatattactaaaaatgctgcatgctctgctaggctcactgtctagccaggtaacctcctgctgaagactcccctctgtggaggtcggtggtggtaacattttttttctgggtgtctttcatgcatacaagcatatatgcattctcttttttccttcgagtcattcctaaaggaaaattgctgcatgttgggctgtagatcaggattacatatgagtaagtgctactcaaatgtttttataaacttcaaaattccaaggtttcctttacttttttgtatgactcatctgtataagagagggttggtaagtactttcttaaattttttttgataagaagttctaaatcaagctttttcttctgagttttcattaaagaatatatatacatagaatatacatgtaaaaaaaagtgcacacatcatttaggtcagtacattttcacaaatgcagtcatataaacagcatttagatcaagaaacagaatgtcaccaccaccccagaagcctacctcatgtttccttctagccactccccactatcctgccttccaagggtatagtaatctgtttttatgctttatatcagtgaaatcatctggtgtataccttttgtatccagcttctctcattcagcattcggtttgtgagatttatccacattgttgcatgcaggtgtgaattgttttctctcattccattatgggactacatgatgtattgttcattctgttggtggtgggctatggtgaatagcactgctctgaacattttagtatatgtcttttagtgaatgtatgtacaatatttttgttgggcttttatgtggcagtagatttctgaggtgttaggaatgtgcttgttcaggtttatgttctatatatggacttccagaagtccatttacctctgaaattataagcacaattttagatatatgtatgtgcataccataacttctaggtaattcttagaagtgtcccaaaaacagtcagaaatacttatcaaaacaacgaagcctcaaaactggttttgtgtctatctagggaaaaataagaggaagtcaagatggtggagaagtatgttttcaggatccaagacagtctgttttctagaacttccttgatctaaaggaaatataaaggtgtccacttgaaattaatgtgttttcccatggaatactatgcagccataaaaaagaatgagatcctgtcttttgcaggaacatggttggagctggaggccatcatccttagcaaactaatgcaggaacagaaaaccaaatactgcatgctctcactttaagtggaagctaaatgatgagaatacatggacccacagagaggcacaacacacactggggcctattgtagggtagagggtaggaggagggagacgatcaggaacaataactaatgggtactgggcttaatacttgggtgattaaatcctctgtacaacaaactcccatgacacaagtttacctatataacaaacctgcatatgtacccctgaacttaaaagtttttaaaaagaaagaaattaatatatcttctgtccaacctaaaataccttagtgcagatttgaactgaagggaaatgttattcctaggcaggaaaaagcaaaagtaaaatagttcacaaattaatttccaacatccagtaaacttagccttttcatatctaaccatgaagagcaaaactggaatttcagaaatgaaaagaggaaaaattcttttcatgccacttccagctaaaaactcctcagagatttctctacatattaatcaaataaatatttaatgaacaatctgtatgcacaaagcaccgcagggattctgagataacaaagacacaattttttaaggacttcatgtagtacttggagaaacagatatatcaataactgtggtataagcaatgaaatatttactgtaatggagattcaggaaatgcagaaaggtcctgagggtgcactcaggatatgactggtgtctggcggaaatatatcccatagatccctcaaaatcaagaaaatcaggaataccctaacccgatcaataatctccctttcagttgtttcatctgatgcattgattatgaatcttcaaagaccaaggatgagaaaagtcacctgtagtgtgctatattttttaaagcagtttctatagcttctcagattgtttcagtaggtgtgtctctaattgagccaatctcatttttaaacatcttgtaacccaaacctaggattataattaacttagtatcatttaccagaatagtgtcctttgaactctgacaaatcagatgagcacaacagatgacattctcaaatgtccatgaaataaactgatgtttgcacaggtatttttattcaaactagaattacataacatggtaaatcattatatgttattatttatagggtgttattgtaagtttgttactgtgacatagttttaaggatgtatctactgtatgcccaatgggcttgagaaaatacttccaaagttttgagaaatggaaacttgcctttctatcagggtatctgagatagctgtaatcttgttagatgttatacactgtaaatatgcatgcttgtaatatttataaatttgttctctatacttaggttttaacatcccaggttagtagacatttcttctgcttttctggtggggagagaatgctaactttgattgggatttttcaaactttagaaatctggccttcctgaacacaattaaagcccaagcttgtgacccaaactctgccatcctttacagaatccaattccttgatgagggcggtaggggaggggctgggtttctggggtccaatgtgtgcactttgggagtctcagtggtacccagtggcgggggccgtggggcttggccaaggtgaccctgttctgcctcaagtagttagaataaggataaggattgatccattcagcaaatactgaaatcacgctattgagatttaaattcacatgtaaacattttccaatactaatttcataaattattattaaatttcataaaaatggagtgtgtttttttcctgattctcttaggagggtaatgtaaggattatgttgtgtttttatgtattcttgtgtttttatctattcttatgaaatgtttatataatgaatttggttgagatagtttatttgtaatttagaaagtttgaagtgtgttatttgtgaatattaagtatattactcaaatactcctaaaggccaaatgcattttctttaataaattataagtatttgattttcctgtaaggtacttgagtattccaaaaataaggacaattgtgattgcacaataattcctttaactggaaaacatattggcttatttagataacataaatgttgttagaatgatgaccttatgattatattgactagatccaatctttagaaatgctcacatgttagtaaggattatgaagttatggatccatagggttctactgatactcatccaattctttgatgctcaaagtgtggttcccacaccagcagcatcaacatcacttggcagaaatgaagaatcttaggtaacatctcagaccaacataaccaaaatctgcattttaatgagatccccatgggcttcatgcagtcattaaaatttgcaaagcactgattttgtgcatcattttatcagacacaaaacccagtccgtttaaaaaaacaaaggactaggaagaggggaattacttagtattcctctctgtcagtaagtttctactcaattgcaactcattgaatctgattcttcacaccacagtgcagtggaaacacccaatcagtttgctcccaacatcccttcatatacctgaacacataagttactctcagttttctctttgggcacctacaatgaagtcagctagaataaatgaatcaatgaagaaattcttccattcattcaataaatccttgagtagttctgtatgccaagagctggggtagaacagtgagcaaaacaaggttcttgtcttcatgcagctaacatttcagtacagtaaacaggtaagaaacgaacatgaatatccagtgtgataaatgctatagcgagaggggtaaagagtgccagatatggggcagggatacgatatcctatagaatggacagagcaggcctctccaagaaggtgtgtttgagcagagacctgaaagaagtgagggtgtgagccatggggctgtctgggaagagtgcatccaggcaaaaggaagagagggtgtggcctgagcagagggctagagagcagagataagatcagaggttgcaaggagccagacagttacactgtaaactatagagtttggctttcactgggagtgggaagagaagccattggaggatttggggcaacatgatctgatctatgtttttataggatcatgcggctatggggttgatgatgttggggcagggatggcaggggatggaagcatacacaccttctaggacaggatcatgatctctagacaagggataaccaaggcttggataaggcacaagtggctatggagcacttgaaatgtagctaatgaaatttaggaacagaatttaaaatttttaatttaaatgaaaattcctgccaggcatggtaatttacacaatcatagctcactgcaacctcaaactactgggctcaagtgatcctcctgcttcagtctctcaagtagctaggactgcaggcatgtgccaccacaccaggctatttttttttaaattagagattataaagggaaatgtcatagtgttccagcccttttgtaataagtgccagtccatgaaagttgtaagaattgaaccatgtcttcaaaatcttaacatttgttttatttccaaaaagcactcaacacactattcccaggtttggactttgttgtcagaatttctcgtattggaaacaagggtgaatgatgaggccaaggcttagatttgtaaaaggaggagggaacagtggttgaagactctttttcagagtttatgtttccatagaagtcacagttgtaaggggagacacaccgtaatgggcagtggcttctgtggaatattatggttggcttgtgtacatctcttagcttctactactcaaatgcagatttcatagtaatatgttggtattgccattataagaaaatctaggctcgatcaagccaatttgtaaggaaaaaatgaactactttgtaagatctaaaagagaaccattcttactggtaagaacagggacctctctaaagttaccattttattttttgcctctaaatatctgacttagaagtgtctaacagatatagatatacctcctagaaagcaaacactcagaagatcctgtatgttaaaagaaagattactatctaattgaagctgcctctctccactagaagaattcagaaacaatcttacattgtaagttagggtttgacagaatcattctaaaaacatgccatcttgcagcactgtgttagggtatgttgcggagaaacttgaaccatttgctagcacctgctaagagcagtactccagaacagttgacagggggggtccaggcagcctgtttcctggaagcgcttccttcgtccggttttacagactcaccatgcagtcttctgtattcttcagtctcttcttactgtcagatacaaatagtcagactgcagcctgagaccacactgtagtcttcagtgcccctgatttatgagccacttaaaaaatatatatataatagctatctattatagatattttacatttatataatatacaatcttttatatctattatatattatatctattatttattttatatgtaatagttctctctatataattctatatatataatagttctctatatatatctctatatatagatatctcatgatctctatatatgtatagagagaattatatataaatatgttatataataaatataaaaaataactgttatatatttatatatgtaatatatagtctcagttatttgttataatatatgtaaaaccaaccaaataactctctagagagagacagacagagagagagtatatttcaactcagtgaaatatacacatgaaataatccccttcccccactgaccactattaactgtgttctctctggtacttagcaaccataaaaacacctcagtcttaatccataaatgttttgtcactttgggcccttaaaatgttatttcagctattaaagattagtcatgtacatgttttaaatgttcagctcttgttggagctgaatccctgaggagcctggactggtggtcccagcattcggtggggtgggggtgtgagggtgagatctgtgtctcccatcccacctgtctttacttgcacttctctgctactagtgtatgagggagagagaaagaagacatttattcttttgactggtcaagacaaatttttcccttcaggagacgactggtgggctagagtggctacagtcagagaaccttaccccatgagataagacactcctaaagtcttttccctagagagtctgcctttattatggtgaatgctctgggtgtatttcacaatgatgatgctttccttctccttgccagagccacaaggagacccttttttggctcttcatgaggagctgaagtaggtaaaactggtggggttgaagtaggtaaaactcacatagtgtgggtgcccagctgaaaacgccccatccccaggagtttctcactgtcaagctaatctgcattcagcctccagcaattaatcagaactaccatctaagtattcttaccagtttgtggtttccaggtgagcgaatctctcaatcaggactctggattttcctgtctctccagatttctgggtggcagtttgctttgcaacctcaattctctgaggagcccaagagcactcattattttcacttttttcttggccataagcgacaactttcaagctctttacaagagaaaagctgaaactggaaatctctaagccaattttgaacttaggggaaaagacttggggaggaaaaagaagccttcaaatggaagccgaagaagtctctagatgatttttccattatttcacaaatggaaaaacttacagagttaattcagagtagtgaaatctgcctatgagtctgacttagtccttattttaatttcatctgggcggccccaaagagtgatgacattgatgataactattacaagaatgagacatacatttcaaagatcttagttatattattccaaaatgccaaagcaagggaatatagctcctaaaagtatatcattttcactaaaaaactgaatactgctctctacctcctagaaatgtcctcagctgaaataagaaaagggggatttgaaatccaaaatgttgcagcatttattagattcatattatcttgtaattgtttaacccgtagaagtttggctttttcaacaagaccaagagcccattttggccaggtaccttatcagagtctccttctttagcctcgcacactgctctgcacacaacagaccttcattaaatccttgaatcagattggatgtggacttgcctggctttttaccgcactggtttggcaggagttgtgtcccaatcttgcttgtcattcttgtctcttggtttaaaatgctgtgctttgcaaaaggcttctttgagcaagcacttgaggaaaaagaattaccccctttcaaaagggtctgaatatggtctttcgtgaggcctattacagtgccttatacctcattataatctactggggagttattgtgcatcttgtaatggaggctaaattcatatttttcattcacctgattagtatttatgtattggctctggtgccaaaaggaatattttccgtctctgtttctccttttcagtagtaatatgaacataatacaaggcagtagaaagagcatcccctttccagaaacaaacaaaaatcaattacagtcagtcctgagggaagtctttcgtggagaaagccaagaaaagcagaaagaaagctgaatgcctctgcctttatctgtcccccctgcctcgcggttttaggatcacattgtcacagccccatttggattctttcatgctcaggtagggaggaagaatttttatcaacacatgattgatgtgtcaaaatctagaaaatttcattggagaggggtccatgcctttcggggctcatttgtgatacgtgttttctggctatagggccaaacatggggctctaggaagcaaaccgagcaggccaaatgcagcccctactctgtgccgtcccgctgtcctcctgcctagcctagcgctcagcaggaagagtatccgggaggatatggtgtagggagcgagtgagagggctgggtggcagctgtggcagccctgcccagccctgtggccactgcgacatcttctgtatgggtcctggggctgctgctctcggatcaactctttgccctttggttctgcctttgggctggttttctttctttgactctcacggatactgcagtgctgcttctttccctcttccatttaacctaatcatttataaaatgaaattcttttccatgtttctctgacttctggctggagagagatcggatgcgggaagctcttgcctccctctcagcagtggccccgaggcatctctagtagtggccatacctctagggttctgggacaccctccagggttccagctcccagcaggacacctggctcaggccctggtcatgcttccttctccctctgtccctttgcttgagggcctcctgctttgccaatattgggactacctctcacagtgatctatttggcttctgaaattttcctcccctggtgcaacacttcccgcattaaattcccttgtggtaaatacaatgaatggtttccatctcctggctgcactggactgctactcctctccctggtatatttgtcttagccctgataggacagttcctcaatgctaaatgttgttttattgttacaaagtttctttttctttttttttttttttgagatggaatctcactctgtcgcccaggctggagtgcagtggcacgatctcagctcactgcaacctccgcctcccgggttcacgccattctcctgcctcagcctcccaagtagctgggactacaggtgcccgccaccacgcccggctaatttttttgtatttttagtagagacggggtttcaccgtgttacccaggttggtctcgatctcctgacctcgtgatctgcccgcctcagcctcccaaagtgccgggattacaggcgtgagccactgcgcctggcccacaaagttgctttttaaaaagttaattcagaccaagcatgatgcagggtgctcatatgtaatctcagtaggtcactgtgaatatttattgctggaaattcatcagatcaagtctgatacctgatgacctagaagagcttggatgcaattttctcaataacttgaatcaaacagaacacagactcttccaaagggtgggccaagatgtctctagaagaaaactgcaggtggatggggtcattgtacctgcagtggagacactggagtgaaatagacctggagtctactctaagcaattccagttattggctgtgtgagcacaggcaagtccctaggtgtctctggtcttagctgtctccataaacaatgggagtcagaatatagcaaggagatacatgtaaaggagcatgtgtgcacagcatgtataaacctgcctctagagctggcttgctttctttgtttctcacaaatgtcaccatgcttttgtctttccttctcctgtttaacctaagaattcttaaaatgacattctttctcttatttttctacagtgcagctaaggtaaaattctcaaaagaaactttacttgaaaaccaagggaaaccaaaaaggaagtaaataatctgacacaaaggcaataaagttacacttgtaatgcaggggtctctgaacaggcattggccagtgactatttccagggatgtggcctgcctgtcaggcttgccctgtctcagagcatttggcttctaagtaccaacatagttctgaggatgtggtatattgcctaactgaatacagtgtccctttcaaagacaaattcctattccctcaaaataaaaccttccctgctttcccctgcatgtgttccttggagattttatttaaataaagggaccatcccctcctcaaggcatccttcattcatcatgttgcccctaaacctaaaatctttgagccggagaaggatctgaggattctgcctttcaacagatgaaataccctcttggtcctggaactggtactaggattactagctaaaagacaaccttgtgtacatttacctctttagaagttgcaaatcaaagaaaaagttctggttgaagcttgatacttctttgctttagtaacactttcttttcagggttccaaggaaccagaaagggagctgtccaacaaaataaagtagcctagagaccacttgttagcattttgttaaaatatagccattgctttagaaacaaattaaaacatgcaatcttcaaataatgtttcattgcacctaccaaagaataaacacttatcaccagtccagaagcatgggcatcttcttgaccttggttctggcagcctctcaaagatcactgcaaaggaaagtaggtttttcattggaaagaaaagttgagctcagaaacaaatcccatacccatctactctagaccacacctatctgtacctctttactctaagacaagaagaagaaatggatttctactattattttcaagaaaccagaggtctttacaatttgatacagtcaggtgcagtcctagactgtaaaccaacctgtgtaatgaaaagaggtgagaggcttaagaacctgggaactcacaacttagaaatatgtagcgtgttttaactgcacgttttcagggtcccagtgtatgatggtctcacgtgtttgaacacttctctgggtgatatactatcaaagaattcttgtcttctttgaggtgttaggtgcaagtacagggactctgtgagctcatagtctctctccatcagtacgtctgccataacagagcatggactatttcagggcaaaatcagtccctgtttaaagcaactgttgaattggactagagtgatacttcttgatctgtgctggtaaacagtatgctgttaaaatactataatattgcttgacatctgtgctacagtgatttcaagaggggaaaaaagtctgctagatgccagcgaggtgatgaaaatgtttaaataagttagttcagtgagatttcagccattctaaatacatctgtatcttatctatgctgttatcttaaagtttagtattcttttctctttttccttaattctattataaatcaaaagcatcaacccacttgaaacttattgttaatttaaaaaggtatatatttatgcatgtatgtttgtatttagctacatacaatattatatattggcctttatttacctcattttttattaggactagagggaaaacttatcaatttattttcactgtaatggcttctatttgcaaacagtagggtttttagtacaaagcgtaataatctctacatcagttttccatgactgctataacaaattaccacaaatgcagtggttaaaaaacaccttaataacctaacagtgctattgtttagaagtctgaaatgggtctcactgggctcacaataaggcgtcagcagggctgcgttcatctggaagttctaggggaaatctcttttgtttgtttttctccttttccatcttctggaggctgctctcattccttggcctttggcctctttaatcttcaaagccagttctgacttctctgcttccctcttccatattttaagcccccttgtgattacctttggcccagctagaaacaccaggatgatctccttggtttgatgcttaacttaatcatatttttggagtcccttttgccgtgtaacctgacatgtttgaaggttctagggatgaggacataaactttttttttaatcagggggagtattattctgcctaccacaatctcataagaaataaatctcccatcttttcttaccttctggaagtggcataaatggcattgtattggtgcttctgtcactccccttgactggatacatttttctccaccgtttggaatatcattaccagattatttcagagcaagaaaacgaaggggtttctgtaagactagagggcttaatgtgtagctgtgtggaagtaatttttctgggattacattcaatacctccatctgaagaatgttgttaataggccaggtgctgtggctcatgcctataatcccagcactttgggaggccaaggcaggagggtcccttgaggccaggagtgcgagaccagcctgggcaacatatcgagacctcatctctacagacaaaaattaaccgggtatggtggtgcaagcctgtagtcctaggtgcttgggaagctgaggtgggagaatctcttgagcctgggagttcaaggctttgaagctgcagtgagctaggatcacaccactgcactccagcctgggcaacagagcaagaccccatctatttaaaaactagaatgtagataatcatatgcactttctctagagcctagagctgatctgacagtcacagaatcctgaactctgtacactttcttctacttagtagaagaaagagaagtgtactaactgcctcagtgggctctaggagcttgagtgcatagaaccgccaagaagtcgcatttaaaaattaaaactttatttctaaaaatacaaattgcagaaaaagaatcttaactacacaagagagagacgaaatagctcatttccatcccatatcaatactttcttcccacccctggagacaggtcattttaatctccatttatgtttatcttgttttgctttttcctctgctctgatgtttgttaggctctgaatagatatttatttcctcttctcatgaagcctacaaacatctaatcattcctatctatttggttttttcatttgtaataatttatatttaaatgttggcaaattgaatggtctaattttgccctttgaatgcctatgcattcaagttctttaggcagaatttatctcttatttttttaaattatattttgagttttataaaaaatggatgtttcttattatcccccaacccataattttcttcagtgaactttttgtttaattttcttttgctttaacattttatttttcagacacctctcattgaacctcacgttcctcttcgtcctgctaacaccattaccaaggtaatgggatgtaggtgggttgatgagccattgagctagcttcttaagtacctctggaggtggtccatatgtcaggggatcacatcaggaagcctctgatacattttctagagacaggaaatattcagtgtttcagttctcaacataaaccagtgacatatcacacaagtgaacaaagtaaagcactgagtgagttatgttttccaagccagagtcagattggaaagtggtttcaggatttgtttggtttgttttccttctataaacacttctttctcctcccctccttccacctgattacaatccaggtcccttcagagaagatcctcagagctggaaaaattttacgaaatgccattctctctcgagcacctcacatgataagagatagaaaataccacctaaagacatacaggtatgtgtgctaattctaaaggctgtgccccgctcatattcatgtttagtgaaaatggaacaaaaatgcttctccctgttttccatgtgggcgcagcccattttgtaatgccttcaggttctggaaggttaggcttgtcttacatctcagcttaactgcagttgtttaattatccttaatattcctagcacctcctaaactaagttgcttggatattggtttagttgtgatgaacaaagagaagaaaatttttgtaatttctttttgctagtgacttttaggaagcctactagatttagatcacattcaaccaacattgactgcacacttatttatactcaaagacctgtaccaggtcccttttgatatattagctcatttcattcacataacactgctagacatgtagaccatttttcagataacaaaactgaggcttggagaaattagttttgcttgtccaaatcacaagtctagtgagtggcagggccaggatttaaaccaaggttggttgatttccagattcagtgatcatttcattcagtcagtcattgatttattcacaagtttagcacttactgtgtgccaggcactattgtgtttcaagctctaagaatacagcagtgaacaaaatatgcaaagtcctttacagagcttgttttctaatgtaggattccatcgtagcatgcatacagtaggatacacaactctgtatcacatatatattcatatagaatatggattcctaattatagttgtcactggagttaagaaatgacagagataaaggcagagatttcatggttagctgaaccttctgggatgactgaaccatggtgggccagttaagaactcgagtctaatccctaacttttgattttcagaattcagcaacttttgatcaattcagcaagtgttgaggaactagaattgccaatatgtggcacacagaccttcactctgtcttcccaaacccagggctcagacatgactgccctctttcagcaatcagtgagactctctttcccatttagcctagacatgacctcagaacccatcagcattggcatgagtcaaaacccatttgattcacaggaaccaaattcataagacacactgaaaaactagaatacaaatttcaaagttaccatgaaggatgcatgtcttctaccaactatgatagaatctacaaaggttctggttcaggaatttgagcataaataagtgctcaataaatgttagttgaatgtgatctagatctagtatctacagggttcaccttaaagcaaacctactcaaggacagagatagaaaaatatattgcaaattcttcctcttctgattattttttctatactccatgcaaactaatactcttctgcttgcatttggcatgaatatgttagaagaccaaaattgacagtgtattacatttagattggcctcttgttgaccgaattttggaaatgagatgagacttgagaaagtgccttagtgtcatcagtagcatattccacttaagacacattccatctcttaggacagattgattacttagccctttttatgttgatattaactaactactattttggatgtttacatttgtaagtcctgttctccaacaccagaagttgattccttttctagtctgtcgacctgtattagtctgttttcacactgctataaagaactatctgagactgggtaatttttgaagaaaaatggtttcattgactcacagttccacaggcttaacaggaagcatgactaagaggcctcaggaaacctacaatcatggcagagggcaaaggggaagcaggcacatcataccatggcagagcaggagagatagagaagggggtggtgccacacactattaaatgatcagatctcatgagaactcactcactatcacaagaaaagcaaaaggggaaaatttgcccccgtgatccaatcacctcccaccaggcccttcccctgaaacatggaaattacaatttgagatgagatttgtgggggacacaaagccaaaccatatcaggccccctacatactgctataattttgagaaaagtaaaggttaaaataaataaatcaatgtgtcatatgtcttcagagagagttcaaccttttaaattcattcaggggatctcaaagatctcatatggttaaaggaactttttcttttcaaaattgtattacttttttccataatttaagatgtgattgtgctttgccaagtattgacttgcattagggaaaatttattaaaatatgtcatgtttgatgatagataatggaaactagaagttagaaaccataatctcttttgtgctccattgtactaagattttaaacccctgaaatataggtgttatgtctgttccatgccctgtgacacaaattaatgacctattgggaataaccacaggactcaactggaagccagaagcatgatttcttttttctgcaggacagtctgagttccttgtcccagatcttatactttccagttccatcctctctctccctcctgcttctcactccattatattattgccacagtattcgggggctgaagcctctcctggtgcagcataaccccccaaaataactatactagcggtctgctgtcaattctaaatcgtctagggatcattaatggaaaggatacctgtgattccatcagctgcaagtagcacaactgtgtgtctttgttcagtattctgactgcaagattcttaaaccctttgtaaggactcatcagacgctctgggatcatctcgagtctgtgtactctttttttgtaaaggtaatcactgaattaaaagccaaatgaaattgattttatgtatttttacatgatttttacgattaatcaattctcaaattaggaaagaaatataatggaaggtcttatgtttggttcagaatgatttataagtaggtgactgtgcccactgaagctctaatgtgcgggtatagactgtaataagggcagtcctggaaatataatggccttctcagtacaccctccctgtgaaatattctgaagtcagggtcaaccccaaatcaaggaatcccacaattcctctgatagatttcagaggtctaagattaaaattattacaactggaaaaggctttagaggccatcatttgctcctcctatttttttttttttttttttttttacggcaaagaaagtgagaaccagagagttgaaaccatgtggccaaagtcacatagctaagtagcagacctagttctgtatctcatgtctcccgccacttcaagattgttcccaaagtggcacagaaccatgagtctcctccaatttcaactagagaggagctccttagcccgtgccccagaggtggtgctgtgcttagtatgagaagggaggccaccagtgattcagtcccagctgcaggcagccagctgctctgtgactccctgccttgttccatcatcccttgggattgagccatcactaggacttcaagattctatttcctctcttgaaccatcatgttgtggatacctgcccccttctctcaccccatggggaatttctgtattcccaaatatgtgagtgtatatacttatgcatttcctaactaatgtatgcagtttgcttatccagaccaactcaccacagaagggcatcttggggactaatgtgtgaatatacaggaagccagaaagcatgtggagctcttcagatgacaggctctggagaagtgctaatgctcattacacagaactttttcaaagagatttgcattgctaattgcttgtttctcccaacacccctccaaggaagatcagtagtattacttgaaaatataaagtgctatataattttgcacttatacggtgcctttcatagcacctctgagtgcctcataaacattaactcattcggcacgagactcaggtggagagagtcagtatgtattttgctttgcctccatcttgcactgagattttctgggaccggctcactaggacagtttctgttcctctgattagcttgccagacaatctccccctctagcggccccctggtctcccctggtgctacaagttgtaatgctttcatttaaccagccttgctttaaagttctctcatgagctgagtggcttttttggcttgtattagcatttgagaacctgaagctaccgcgtgtggtgctttgtttgccatgagacctcttctggtaggagatcattaagccctttggtaggttttcctctcaaaagccatctcccatcctctatctgaaaaggggtgacttccccaccctttctgtctcacctctccttagacaatgctgtgtgggaactgaactggtggactggatgatgcagcagacaccatgtgttcactcccggactcaagctgttggcatgtggcaagtcctgttagaagatggtgttctcaaccacggtaagatgagccccagtccctggaaacctctcaagaaatgctaagtgcatttccctgggtaagtagttgctgaactcttgaatgggcaagaaagaattacgatccctttagggacctgcagagctagcatcttcatttagcaatacaaatgcagcaagtagatgctattgattgctatgttccaccattgtaccttcctaacttgggagaatgtatgaaaggaaaatgaaattgcagcccgagtgcatcagttccaattatgtttattagtttgcattcacggttcattgatagcgtgattatactctgagcagtgcatagcaatcctgatgcaggggcagaatgaagagcagtgaagtgtgtggctgggctgatgacatgaaagtaagtaatgaattcggaagctgccttttaattgtgccgctgtctgggagagccaatttgtatacccacaggatgaccatatttaaaatcaagaatgtgctctgcaattgtggctcttgataactgcaggggctgtaattgaacagagtagctcttcaggactggtgtgtaactctggccaaactcttatgccatttgtttaagacacttccaaacagacaaaatattaaaaacattcatttcatttaccaacacctgggaatctagtaatggttttgccagcgtttctcatactttaatgtgcatacatgtcacctgggactcttgttaaagtgcagattctgatgtagctcgtctggaatggacttagagtctgtatttccaacaagttcccagatgctgctgctgctgctcctccaggaatcgccctttgagcagcaagggatctactgcttgtctttaccttttgagagtattgatgctccatcctgaaaaggggctcaaggctgtaagacatgtacatgagggattctgagccacgttcattgtctttgtcctaccgagatttaaatcctgtttaaaggaacaagaggaaaaaactttaagacatcagatttggaagaaaattaccacaaaatccttctagcagtatatgatctagaaacctggtctggtcagctttgttcaaacaactaattttatactaacatttttttccagagtgcagacagtacagttgataaacagtacatatagaaagaataacataaattctgatcctgacaaggcagattgttttcaaagcctgtactttccaaagctgtgacagaacatgacctggcagttggttcctttcctgtttgggacacaggtcccacatcctagaaaatatcaggaagacgatttctgcaggtcaaagtgttcatctgagaaatgctggcaggtcctcaaagggagtcccacagaggccgaggagatgggtgggtcagagagggctgtggtgtgcatgactgcagccccgaggtcatgtcttccagctgcacagtctgggcagggcagagtgagaagggcgaggaggctcccggctttgctgccacttggccctcctgcctgacactctgcatttgtttctagtaaacggagctgtgaggccgaggtgctgcagctgacacgtgcttccatgtttcccatagtggaccaggagcaccatttccaagacaaatatttattctatcgatttctggatgatgagcacgaggatgcccctttgcctactgaggaggagaagaaggagtgtgatgaggagctccaggacaccatgctgctgctgtcacagatgggccccgacgcccacatgaggatgatccttcgcaaaccgtgagtgagagctcgtggctcacccctccaggtcccaaggccgcctagtgcatagacataccatgaggagagacacaaggctgctctcaaaagccctggccatcccccatggaacaaaagggagcagctgaagggtgccacagcagtgcttgtctctgttattttaatttttgtgtttgatccagatggctccattttccatttgcatgagttaaagctgtagaggttgtcagtagttggctccggctgtcaaaactgagtccccatattaaatgacctttggtcaatgacaaacagaaactgctctgtttctatgccagcctgtggcagcacctttctccctaatgcaacaggacagaggtcatcaggaccatagccttcatgcctaggcctgcattcatttgttccttcactcattcagcacatgctcttacccacctctgaggcttctgttcttcagcttaaagctcattcttctgagcacaccacaactgcattacccctgtcaaggcccccattgagccactgaggcagtctctcccttctgtctcagctgaacccaccttaccttcaggagcaggccaccacctgcaattgtggactctgaaatgtttaatcagatccactcagaaagaatgtattattaagcccccgtttgatgcagggcactccacaaattgctatggggcatataaagaagcatacatgtggtcctgatcctcagggaaaccttttcagttagcggtgacttggcccttgcatccgaaaccaccacacaggcttgtgttttttggctggaaatgaagacgccctctgccccacagccagcgtcggccagctgtggatgtcagctctgagtcatgtttggccgaccttggtgtattagtcttgtattagacaagggcattacatgttacatgtcctggatgtctgctgggtgctttccaagagtgaagtgtccctcaggccagcctccccagaggctgcccctcagaccaacccacagtagcctctctgaaggcactttaatttcccttccccaggattctttgacttgcccttactcagggttgtcccctttgtcaaaactttctcatgggtctgactctcccacaccatgtgtttcaaaggcctcccctcatcccagcagataccatcatccttaactctagaaccacactcttcagctctgtaagcctcaaaaccctttcttcacataaaaagatgaacaggaaaatccaaaacatcaaacaaagctagagcttcactgacataagcaggagtggggtccaagaaacctgcccagccaatgtatgctttctctgccctgaaggatcataggagagcatggctgagggggcacaagagaatccctggggcctggggaactcagatgaacaccaccattttaagccatgttttctttcttgtcccctcttgtcccactgtccctcctgcatatttcctcatcatttcctgggtccatcccctttttgctgtcctccttgctgccacctgcatccaagccaacatatgcagtggttctgaatcaaggtgggacagccccctaagggctgttgtcaaagcacaggagggggcccactgctagcactcactgggcagtggctaggaccaagggctgccaaacacactgcagtacctaggaacccaacacaataaagagctgtcctgagaacaatgcccgtgtggagaaatattgcagtcaaccatgagtttcttaaaggcaaagacagatctcattttactacatttgttcatttattgagtacctacattgttctagatactatgttaggtgctaaggcattaaggtaaacattgaacaagaaggcttctcctccttggagttttctgtctagggcagaggattaagcaactacttatgcaagcaatcatttaatcacagctgcattacatgctatggaggaagatgtagtgtgtgttggcacagcctaatgtggaggagggtttaacctggtgtggaacttagtaaggccgtatccctagctctgtgcattacaccacataagccatcagtaaacctttgctgagtgagtgaatgaatgaatgaatgaatggaagtgtgaatacacagtcccagctaatgttccctcagctcttacttgcttcaagggaggcaaaaatgccatctgattcacaaatgtttttgaaatggctcctgcccttggggagtttataattcagtgggagaggaatccccaaattagattaagatccaacaatcatcaattgagtgcctgctgtatgctaggaacattcatgctaattgtttgatttagccttctcaagagacatgagagcttgttttcatgagtcaccttgggagaaatgggagtcgctgcttgtgcttccttttattgtccatacaccattgaatcgcatgatccctggcagcccagattcttcacagaatattacattccaaaactgacactcttccattatatcgctagttgttaaagtacaggttttacaaatattccaagatacatgatttcaggtggccttgggattttcccatcttcttaggtttttcgaaactttgcaaacgttggaattgggctggcacttctggaactcttcagttttctttctgctgaaataacagctcccgagagatgggaaagtgaaaaataaggaatctaattttgggagacagatattccaactctacatgtacatacacacacacaccctttttttttttttttgatctgctaataatctttggagctactactttatttaagtggaaagaaaacaagcttagttgatcaagaattgccagtatcactactgtccttgaagggaccaaccaagcacttcactcctggaaactgagggcatgttcagaggtcctggaaatgttgactttctactgccgaaagtgctaagtcattaagaaatgtggaggcatgagatgcattggcttcatactgaccagggcaggacccccaacttttaaactcagcacggctgcattttataatagtcaccactgccagagaggttgcagaactctgataattactgggaaagaaataacacaatattctttgatgagaagattactttgagaatttgattgtataatgaagatgttgctttgaaaggtacttcctattgttctgaatctgagacttgctagcaaaaaaaaaaagtgtcacttgttttgacaggctacttagaaaaattctctgtttattacattaactgcagcattttaactgtcaaactatgaaagaatgttctgtagtttaaaaaacagaatagagcttcaggggaaattttttggcacactcttgttgctattggtattgaaaaaaaacacatacattctgcatgtgaaattagctttttatgtggtggcagacagagtgactcacaatgcccgtcctggtttcgcaggtgcagacctggatggcatttgggggcaagtgctacagaacgatgacagtttgacggtgctgttgttgtagctctgagacagggccatcaaacactgaatgagctctccaagcttattgttttgattttgctttgtttataaatctaaaaacaagaggttgccctatagcaagtagatataatgggtactcttaccagtagaaatgtgcattttggctttctttgagcaggtactttggttagagaaatatgagtaaaaggatctggagtgactaggtaaacagagtattgtaaacttgaggccaactgtggataaaaaagaggcttcaaggagacaggacgctctgctgtacaagccttccaaccactccttccaagtaaagtgagacataggttccaatgttcaggatggtctatcagagaccagcctaaagttgggaggacagttaagtagacactgtttcccaaatcaaaatttaggtctgcagttctgaaaatgcctaacagtagaagcctaagtaagttgagaaagagaaaagtcatttgggcccgagcagagagaaatatatgtatatataagagaattgttagaagttggggaatcttccaactgggtcagaaacacacaaacttgagttcgtttattttatgtgataaattaatatttcagttgcccttgggatttttcccatctccctaggttttttgaaactttttaaacattggaattgggctggcagtttcttcttttgactctttctgctggaataagagctctgagagatgggaaagtgaaaagtaaggaatctaattttaggagacagacagtccaactctacatgcacgtacacacataccccattttttttttgatctgctaataatctttggagttactatttaattttacttaaacggaaagaaaacaagcttcgttggtcaagaattgccagtatcattgttgtcttgaagagaccatctgaacacaccttgctcctgaaaactgagagcatgttcaaaggtcctggaaatggtttttttgtttgttttcttattgcccatactctgctaaggcattaagaaatatggaaacgtgagatatattggcttcatatcaaacatatgctatagggcgtaaagttgaaaggcaacaatttaagatggattaaatgacataaaggcaaaatactgtgggcgggggtggggagggtattgtttatcccttaattggctgccctaatgcaaggctgtcctgcagaggctgggtggagactaccctgctgctgttcgattccacacacttgctctagagggcgcgtgagagcctgtgtattgtgtcttaattagcagtgcctgttttaataggatctttatttgtctaaactcttttccagggtgtggaatttaaaatcctggtaattatagagggatttgtttcttcgggggattccagattagcaagcctaaaattggtggtggttagggttttgatttctgctgggatgtgtcaagagaatgtccacagttacgaagttcatctcaaatgttaatcagatgagaagaaaagcacgaccgaaagaacctaggcttctgaagtaagacagtcacggcgaatccttccttcactgcatggtgaccttcaccttggtctttactggaaagattttggcgtcacaagtgaaagcttgtagaatttacctgaataaatgattgcattaagtaggtcatttctctgcctctccccatgaaagcaatttattcttattcctcatatccacatggcctgaaaccagccattggattgctacctttatgattaagattcaggagaggggaggatgaacttagctgctcatctacagtttagagtttattataagattgcctcaaggttttaatgactttttattgctaaagtcgatctctttattggagaaaatttggaaaccactgacaagagttaaaaaagaagaaaaaatacctgcaatcacatgtctcagttaattactgttaacattttggtgcctatccctttagttattttttaattcctaactttttacacttaataacatatcacagcattctctcttaaagttaaatatcctttaaggatggagcttttaaataggtgtgttctctgaatgttctttaatgcattcagtttgtgatcgttggatgtttaggttgtttttcaagcccctttttttttctttttttttttttttctttttttgagacagggtcccactctgtcacccaggctggagtgcagtggggtgatctcagttcactgcaatctccacctcctgagctcaagtggtgctcccacctcagcctcccgagtagctggaactacaggcgcatgccaccatgctcagctaattttttagttttttatagagacaaggtctcattatattgcctaggctggtcttgaactcccagactcaagcgatcctcccacctcagcctcccaaagtattgggattataggcatgagccactgggccgagcacctttcttcttaagagcagcaaaaaaataatattttaatactcttcttcccagaacaaaggaagagctcctagccagataggggcacaggtggggcagaaagatgctgggaaagttcccgcagggaactgtaaactgtttcacaccaagggagtgaccggacaggagcactaggagatgcagctggagagttaggctgacgtcagtgggggcatctgccatgccctctgtgtacgttgggtattattttatagtcatttggggcaccactgaagagttttagagagaggtgtggtgtgatcagatttgtagtaggttggtttctctgctatctccagagaatagactggaggggccaactaaagacagaaagccagatactgagttttatgagattatgtttgttatagtttgaaatgacagcctttgagatacgtgcatttgacccaagagtcttgtaaatgaagtgaaaatactactgagcacaagagctctgggttctattcttaccagtttatcattatatcatctaacatcttcagattacaagtctcttaaggtataaaaggaattcaataatacctgcttgccctctccctacttcacaatagattggaaatgaaaacacaagtgccaactgaatttaactatagccaccatttatcgagcatctgtgtgctagacactgtgctaaacaattacttaattcaattccttcaacaaaactctgaggtagttatttaacattactcccattttatggacaaggagacagaggcttaggctgagtcacttgcctatggttatccacaaaacactagactcaggattcaactcagatctgcctgactcttgagcctgtgctctttactgtgcactaccataacctgccatcgtccaaaggggcttcagaatggactcatgggtttatgctttgagcattggaaaggaaaggtgtcagggaaatccaatttaaaataattcttacaaggctgggtgtggtggttcatacctatagtactaacactttgggaggctgaggcacccagatcacttgaacccaggagttcaagaccagcccgggcaacatggcgaaaacccatctctacaaaaaatacaaaaatcagccaggcgtaatggtgcatgcctgtaatcccagctatcaggaggctgaggtgggagaatcacctgagcttagaaagtggaggctgcagtgagccgtgatcatctcactgctctccagcctgggcaacagagtgagactccatctcaaaaaaataaaattattattacagactaatctaatttcattaaattattaccatatagaccagaatggagttcaccatctactgtggaaaaaaagtcctctagtatggcagattcccaggcgtgctgctaatccataatgggttaaaatgatgatgaagattattctttcctgagggagttacatgcttctggaacctataattcttttatttttgtcttatgtcctgagttttactatgtattgtcaggagcagaatccaacgggccatatgggtctaaagttttacaatccattgtcaaactgattgcacagaaatgaagtgctttatagttttaattgccatatgattagggttgccaggttaaatacaggatgcccggttaaattggaatttcagatgaataacaaacaatgttctgatataagtatatttcatgcaatatttttatttgccaaatccggcacccaacttataattaatctgcctctcttcacagctcttttgaagacttgctggaaaatttagtctaaagatcacataaaaaacactgaaaacccacagctctggaaagagtcaatttactccacagcaaccctctagccagaaccacaaacaaaacttaatcactaatatttgaataccactgtatagtttatatagtggtctcacatccgtcccctctttgaaccactaaaaagctctgtgaattaagtatggctcatgataatccactatgtcctgacaaagaaattgagcttaatcaataccaagtgcctttctcaacatcacacagcagtatacgtggctgaaccaggaactgatccaaatcttactccaagtccaattttatttcttctttttttctttcattgacaatattatttcctctctcctaggttgcctcaagtgtgtcctcactagtgaatttactgaataagcagtgaaataaccacaaaatatggataatctatgtccctgattaattaagaattgacattttgcaaggaagaagtaacaatgcattcatgtagcaccttctcaaaaaacatttgcattttccatctcatatgtatatttcatcctcaaaggcaagcagttatactatctgactccatccaaatttatttgttcttctcaacttgttgcttaggtgttttaaaggaaaatatttgtacttgtaccttttaaaagatttaatgttaaactcttgagtgtccttgtagtaaacacttttgctggaagaatgctgggcatatacagtttctaaatgtgatcaaaccacattgtcctaaaaacacttagcactcagaagccatgaattatggaacccttatcccatgtcctgacagggatgacttcatttctcacaagtattcataaagcttttgccctttattgcagttatagactgtattcatttctaacttcacaaagcagaaaaggatccctgtgtacacaagctctgctattaggactagaaagggaacttaaaacgtcctttttggggttaaagataaggtgagggggtggtggcatggcagggagctgagcagtcggagctgggtaggacactttaaatgtgcagtcaccaggttcctggaatgtctctgacacttaagaagcaggggtcctgagaggtgaggcaaagaaaaaacatgctttgctggttttgctagacaaggaagtgcaaaactgcactaaactttcctttaagggaagtggaagaagcgagatcttaagatcttaacagtgtgggaaaatggtccaagtttgagaaaggacttaaaagttagagaatcaggtggattgagatgaagcgttgcatcaaaaataaagcatcccccaccccacacacacaaaaaaatagagcatttattttagaaacctcgaagcttgaccatggcttatgtagatatttataatgttgatttctccgggtgttttccccttgtaccaaggtctgctaggtgacaggtctaaaggactggaatatttgctttcttacctgcatattttactatgggccatgccaatgtgctgcttgatggctggatgaatccctcattttatccatgttccaataactgagaagctctgtctctgaccttgataaattccttgataaaactgtatttaccagtagcttccaatatcacctgagccctcccatcctttaatgtataaactgcttccctatccatccccatttattatcttgtctgtaactagacattgctgccagaatgcatcccctgcagaaactaggcctttccacagcgggatccgacaaatccacatcaatgtggcaccacgcagatttgtaaagaagcagggatgcctaatatctctccctgtgtcatctggagaaggacaagtaaagaccaggtacattcaccggctgccactcagagcagccagagagtcaattcacttccccagccttgtaggttactcttatgaaggtgcatgggagttctctcctcctgctcgggcacagtgttccctttactcttgaaagccagattgccttcagtccttgggaccctttcattactgtttgaacagtctgggggctgatttacaggatctcttctccattttttttcccctgtcacccccgtaaagaccaaagcaggaaaggtgcttaatgccactgtttgccaagagaaacctgcttttaaaatgcgactttgttcagtgattgtggtggggaacgctcagttttagatgtgatcaggtgctctttgaggggtggggtggattgggggagaacctttgtctgatgtgagagtagagaggtgagccttttctgagacactagatggcacagcagctccgagccagcagcctccgagaggctgggctggtttctgttactgctgccacgaacactgagcccccactagggtgggagggggctccattttgatgcactttggtgggcacaggttgaccagactgacttttgctccacctggcctcctccctgggactcacctcaactttcaatcctaatgacatgttgaggcccctgagggacagtgtcctagctcacagcaaatctctcatgagtgcttttgttgctttgctagctgtgtatatactcattttttaaagtaagtctcttcacacctggcagtcctgacttctctcacatcattaaaacattggctgtaaacaggaccaaaaagttctttgctgcctgggtggattgccaaatgatagttgcttgctgtgtgattgttgtgaccacctcagaccacagggttggggttttgttcttgctgtgcttctctttttttctttgcagcttgaatgttgtttaggattcagaaactaaactgtttttaggctttgttccctttagtcccgaacagctgttgtggacctctctgaggcatccaggagtccccatggaagcctctctttctctgcgtgggttgttgatgaatgaaagaccaggaggtaaagcaggctgcccacgtgggcttctgtgcagatgtagtggtcacaccccccccagagcttcccctggaaatgctgggggctgtccctgcaaggaggcagttttcttggcaggctttgctttggtagaggtacctggggagcaggcaggctcacaccatcccctttcctctcactagttgccaaaatagcaaggatttcctgggaacagagcccttccctgctcttcctgggagagctgccttcttctcctactgtgtcacctggaagagcctggggttttcacaccctctgttctgcttctcccaggctccagtgctcaccctcagtcctcctggggcgtctgtcttagagagcaggtctcaaggtcttgcctggcagtaaatctgcccctgtccactactgagtgtgacaggcgtggaaaggtaggggcctgaccaagtggtggggccttttgatcaacccctctaacaccgccctctcctgccctctgggctgattgacgcagagctgtcttatcagtgatgctgtcttactcctgtgatggttttcttctgtgagggttgagctgcggctgcttccattcttgtttctcagacattcttttctcgtctgctctctattatccaggaattcctaaaactttctggtctgctgatagttcatcgtttgtggtggtggtgttgctcatttgttttccaatgtcattttgcatgttaaaatatcttttctgccaaacctttagcatggcagacaaaaatctggctaaaatgaagagattagcaaggtgctgcttgttggtcctgaatggacttccatttaaactcccgctgatctcaacataggtactgagtatctttagctggtctaagatgggaatttatttttcacaaacagttgagtaaatctgtaatcctaagaaaaatagaccttttctatcattttacagaatttggagtaagaggtgaggcccatcattttcacatctcctccctctattaataattaactatttgccatgaaataaatgtgtcctgtaccaaaagtgagttgtgccgtggatgccttgccttgcttaacctcagtgggaaggacaacagagaataaggacacatctccctcaggacgcaaaagaactgctccatagcaccactgccatctcccttgggcagaccctaaattcagcatgaatcatgagaactcgtgtgttcactcatacgatgagccatattaaacacccaccctgataacaataccaccctacatttgtactatattttcagtatatacaaagcttcatgtatattacctgatttgacctttgtaacaatcccatgtattattctcattttacagatgcagaaacaagtcattagatcagttgagcaactaggaagttcatgatttagatctcaaattcagtttctgcttccaatctagtgcctttgcactaccagatactgcttctcttgagaagaacagtctagatttatggatatttaagcaaataacattcgtgacagtatgttgtaattaccatagcagtaagaccatgtgccacggaggaataaatgttagagagtggccttgcatggtgtctgatgcctgtaatcccagcattttgggaggctaaggcgggtggagcacctgaggtcagaagttaagagaccagcctggccaatatggtgaaaacccgtctctaccaaaaaatacaaaaattagccagacgtggtggcatgtggctgtaatcccagctactcaggaggctgaggcaggagaatccttaaactcggggggcagagcttgcagtgagccaagatcacactactgcactccagcctgggcaagaaaggtcagagagccagtttcacttaggaaagatgacattgagctgggcttgaggcagaacaaaagtattttaagcaaagagaagagcatgcaaaaagtcctgcaggcatgaaaaagcttagtgtgttcgaggaatggagagatgcctgggatagctggagagagagtgtagctatcagggaagatgtgaagagaggggagatagatgagtctagagaaggaagttaagatctggtttccaggagcgttgtgtgatgaagagggagcacttctagatagattaagctggtggtccttgtgagttatctaggaagagatggccaggaagcccttggaactcaggaaagagggctgtttggagaacaagatttaggtcttgtcattatctagatggaagttgagggtttttcccagggagagaaggtagaacaaagccttgggggctgaacacaatacaagggatggacaaaagaacaacaaaccaaaaagacattgaggagaaatgttcaataaagcaggaagggagccaagggggaggagcatggggagaggagagagcttcaggcatgcttagtggtggagggcagcagttaaagtgaacatggttcaaaaggagctggaattctgccatctttacctctcttcttctacagtttgtgcaggtcctaagactagctgttacggctcaaaggtcagccttgaaccatgatgtcaaatttttagtatatggtatttagggtctgacagttcttcatcctgtttcaaatctcagatgcaatattattaatatgttgagatttgtagatccaacaagcatcattatgtatgtgtgtgcagaagcggggtctcactctgttgcccaggctggtctcaaactgacctgaagtgatcctcctgcctcggtcccccaaagtgctgggactacaggtgtgttccagcacacccaggcaggatagcatttttaaaaaagaaatccataaaagttgagtaatacagatctcatatttatattatataaacacttttcctaacctcatagagatctgctcccaaaattacaactttgaatatgtccagattttagagcggaattctaagcctttcttttcccagctgagcttttctcctctcaccgtaacagcccaccccatggaggtgagaatgagacttggtgactgctttctcttttagccaagcttctaggagggttccctgttatttgctgctgatgtcaagtagcaagaacagcagggctgctccttgtgctgaagatccataatcctattacgcctaccttgagactttcgcattagctgcctctatagtagtagatggatgaaggtgactcgattgacttttaaatccccaagagtcccagtttcaaaatccccatgtccaagtcaagtagtagatgagggctctggccgagaaggcctggctcctttagagcccctgtggccacagcttttcttcagcatctttatgggtcccatactttctgggttccaccataagcacgagattggtgtgcatttgtgtccctcagtggtgacctttagcaggaggtgaacctggctagcatctcccgggtcgtggatttagtatctgtctttatacagtcaggattaggaagatagcccctgttgattccagaagagaacgttataatattcttttgttcacgttaaaactgtccttgggaaggtactgtgcaaagtatgcagagttttcttcctccaattagactccactaaatctgtcatcttccccgtgttagaatatggttgcaaagttatttaatccaattaactattttagaatattcataattcagttttgattactaagagtacttatctaataatcagctaagtttcagatgtactctagcagaccaaatgtcatagtttatttgtaagtttgtttaactgcttctgcaaaggtctgagttttgaatatcactttgctgggtttttttcacttacacaaataaatatgtagacacctttatggttgctgcttctgttagctctcacatctctctcagaaagatattgtccccagttttcatatgagactaagactttgatgtcacatggctggtgagtggttgcactgattttaaacttgattttcagacgctaaatctagcgctgtgtttagtacaccaatactcctcaaatttctttgaccagggaacaccttataaatgataatgtcatgatggtacatcatcagtagctcatcaagggtttaatgtttaattagtaataattacagtaatattggataataccataaattgttaaaattttaggacaaaatgcacaaaatggatggttatgtaatagataatattcataactgcagcaattagctgagagtaaatgccgcctagccatcaatatatacattgtctctcagttgactccctagaactctcaggattaataacccattagtttgttttcaagtttcaaaaacatattagttaggattctttattttgcagaaagcaacaaaaaattcaagttgctgaccagttgtatctcctaccattaatataaacactatgaatgatttcaaaataattatagatacgaaaagtgattaggaatctattcagtcttccagtgccaaaaatgtccacaacacccccataccctacacatgtcctacataattctaataattcaagaagaagaaggaagtggtttcaactttcacagattatatactgagtccttgaaggcatgttattggatactagttttataataaattttagaataaaaatgctttacataaactgattaatatctggtgggcagtggtggtttttgtaacaagagtttgggaatgtggaatatacctcccttcttgccttctcttactaatcgcagatgctaccatttgccttctcttcatctcatgcccttatctcctcagggctagaaaagaaaatgttgagtctgcatacatcctatatttgagtccttcggaaaaaatacattttataaccccaaataatagtgacagtggcattattattctgctaggctaagatagtacacaggatctcaaggaatttagatcagttgtcaagttgattataccaattgtttctagtggtgttaaaagacaagttttgccattactgattaaggtggtaatgaaaagcagttttttagctcaatcatctacaaagtgagagatgagttggccaactaccatgtgagtggagatgctcttccctctgagatcagaagagaagggatcctgtggactttggctttctcccatatcctttcatcaaggaacacatttatttcaaaaatccctttaggcattatactggtgcaacctctccctccgccaatatcttcttgtgcagaagaaatccctgagcatgttactgatgcctggatccgtttccatgtttgaggccctagtgatgccctttttccatattcctttttttttttttatctttgtagacctggccagaggactgtggatgacctagagattatctatgaggagcttcttcatattaaagccttatcccatctttctaccacagtaagttgtctcttagtttagcatggttggagcactttgcaataaatgcactgttaggacagaggagagtattacggtgttgtggggggaaagaatgtctgattttcacctcataaatcacctctactctcttacgagatgctgaggaagttatacccaagaacaatcactgaaaggaatcaaattttgtcctattattggtagttgcccatgtgccctaaaccccagagcagccccatgtgagtagggttggaacatgggcttcatccctgtgaatatgaattttggaacctgcacactcagataagagagccaggcctgggagggactctgaatcctgccatggtatgctgccagagggtggaaagagggaaacctagatgacctgtcttggcttatggggccaactccaccagggtttgctgccttcttgagaatggaagcagaaagttcaagagagcatcagctcagatgtattagtgaaaataacaccacccactaataaaaaatgacccagtggctgtatctgattctgaacttttacctgattagagtatttaggagacagaaattttttgccactgaatagggataggaacacctcctcccttaagaatatgatttttaggaaacacacatgtcctacacactaataagttaagaagaatgaagtggtttcaactttcacagagtatatactgaggtccctaagaaatatctagatgcctagtttgttttcattcctagctcactaaaagtggtgttctgctacctcacagtagcagtacctgccagtccctgctgttggggataagttcaggtctctgttgagagcagcgaggcatttgccatagctccaagcaagagggcttcaagtcccctctccccttcaacctagacaaacctccttcacatatctcccacctctggcaccactgagggtcttgagacttgctcacctatgtggactacccagggaagtggtccagcccagcctcccacctacctaccactgcccttgccatccttactctccacagggcatagatgtagtgcctgggagcctcacctgggaagccctcatatatacagggcagaaagctgaggctccatgagctagtgatgtagagggaagtaaggaaggacccctttccctgcctgtgctccagggacccagcatgtcccgatccgacttccctggtctcagtggaattgagaggattgtgggtagtctcgtcttctacctcaaaccccaggtacccaggcatagaaaaatctcaagttactgggttcttaggaagatagagccatgatttgggaccgtaatttggaatttttttttaaatgtgaattttagctagctaggaataatttggaattttaactaagaatataaatgtgttcgttcatttaggcttcattattcagcttcaagacatagaattttccaacatgtttgccatgatgcattatatgtaatgcaagcaagagtcactagtaacaacagaatcatgtgatgttgcacatggtctccccttctcacccacagccaaagacaggcaggcaagtgggctagttaatgcaggtgggaccatgtttgaaacagtctctaaggaggttgcctggtatgaattagctataagctattctataaaaagagctacaagctttaaaagcctagcagcaaatcgagtagaagtgattttagatgagagcagcagcaagagaggtgagagatgactgcatgggaagccccgggacagtttgcattgtgcccccagaaagagtacaacccttttccacccagacctggaaatgtggcctttgcatgtttcttctgtttttcttctaggtgaaacgagagttagcaggtgttctcatttttgagtctcacgccaaaggagggactgtgtgtaagtgaaaagctgtactggaaccttgcgcctggccagcacccttgcaagcacatgccacgggaagccaggctgctaacgcctcacttcttggccccgggtctggcttggtgacttggcagggtgtcctgtggtactttcgtttttctggacctgtgattatttccagcacatgtcaattattctgaagtatcgtggttttctagtaccagcaagtgttgtgggtgccagcctgagtctcactggctccctaccctcctgactcaccacagtgtttaaagagggtgggatgaagtcactgcccttcaggaagggcctgaggcagtaccttttcccagtgacctcatttcgttcatagctttagaagaactaatcgatctcttgaggttgttagttagaatgatatttaaaccatcctactttatttttcttctctcacttccactttaagctccaagctggagagaatttctttgcttcaaatacatatgcagtgttaatctatagtatctcaccaaaatccaagttgcagtttagttctgtgatcatatttggaagcaagaaaaggaaatttgatgtgaatagatgtgaacaatattatataagctggcattccttactactcctacaaaaatctggctggaacaaacagggttagtgatctactaaggtcaggaaatgcctctccaatctctcttgcagaatcacaggacacagcagcatgctaatgtgttctcagaagttctgcaataaggagaaatgatcaccacgtttaaaccgatacttcctgagcctaatgacacatagaacactttttgcatggacacctgttaactctttagagacagtttggaaaatcttgctctttcttcaggctacattgtatgagtcaaataagcaggaaacattaattgtaaatgtggtttttttactttcagtcatcaaaaatgatatttctgacattgatatctattttagtaagaatgtaacttcttcaaatgttcaaggcttactttaatatttttatcttaatggttgctaatgacttattcttttttattttcttttattcttttcattcaaacttgctaattgttttcattttattatgaaatagttaaatattttaaacaaaaaatagagtatattacaattaccttcttaatctttgtcagataataacatgccatttttttcatattttctttttttttttttgagacggagtcttgctctatcacccaggctggagtgcagtggcacaaccttggctcactgcaaccttcacctcccaggttcaagcaattctcctgcctcagcctcccaagtagttgggattacaggcgtgtgccaccacgcccagctaattttttttttgtatttttagtagaggcagggtttcacctagttggcaggctggtctcaaactcctgagttcaagtgatctgcccgccgtggcctcccaaagtgttggattacaggagtgagccactgcactcagccttttttcatattttctaaagaattaaattatacacgctgggtgcagtggctcatgtctgtaatcccaacattttgggtggccgaggcaggtggattccttgagtccaggagttcgagatcagcctggggaacatggcgaaaccctgtctgtaaaaattagcaaggtggattggtgcatacctacagtcccagctactcaggaggctgaggtggaaggatctcttaggcccaggaggtcaaggctgcagtgagccgtgatcacgccactgcactccagcctaggtgacagagtgagaccctgtctcaaaaaataaaaaataaaaaataaattatacaactacacttgaagaccctttgtaccctcatttatcccattttcatctttcctaccccaaggtaactcctaccctgaatgtagtggtgatcattctaactcacttttttaaaaatacagtcagtcctctacatctatgtgttccacgtttacgaattcaacccactgaagatcaaaaatattccaaaaaaaagaaagtggatggttgtgtctctactgaacatgtacagacttttttcttgttattattccttaaataatacagtataacaactatttacataggatttacattgtattagctattataagtaatctggaaatgacttaaagtatacaagaagctgtgtgtagactatatgcaaatacaccactttatatcaggggcttgagcatctgtggattttgatatccttgggaggtcctggcaccaattccccatggatacgaagggacaagtgtgtgtaggtatgtatctgtaaacaatatatagtgctgatttgcatgtttttaaacgtcacattacttgtcagattacattttagagccatttttctatgggataagttttaatgaattgtggaagaaatgtgtatggctttaagaaacagattgctgataaattgatatctactaaaaacctatgttttagggcatagcaaggaatgcagtgtttctctttcttttgtattctatagaaaaggagataatgtgccacctgaacaagttaatatttgccagtgatgtttctcgaattttacgtatgcatattttctggggacttaaagtgatgatttgataagctgtaatttatattgatgtgcttctattcttatcataagtcttttcatctttttgtgtctagtgtttaaccagggggaagaaggtacctcctggtacattattctaaaaggatcagtgaatgtagtcatttacggcaaggtatatatatctttttctttttgaaactttattacgctccacttactagtgtggctctaagtattagcaatgtagtgccacaattaaatttgcaacaacattgctcctagatgtagaaaagacattattgtatctttaatcataagttacctcagttattatacttaaagttgtattgtactttctggggtttgtctcctgatggattatagtgtgtacatttaagttaagccacagaccgtattactcagtgaaagcaaagtgaacatcataatgtaattatgtaatcccctttggcatcgctaggtacagcccatttatctacaatgttttaggggcttgggggtcttgtggcaggaggtggtgggtgtttgctctatttcagggatcttcttcatctgtgtgctctactctatccagggtgtggtctgcaccctgcatgaaggagatgacttcggcaagttagcactagtgaatgatgccccacgagctgcctctatcgtcttacgagaagataactgccatttcttaagagtagacaaggaggatttcaaccggatcctaagggtgagtccaaagcaaagtgtggctgagagacagcccatttttttctttaactaaataagcaaagctttgagcatagtcttaattgagtagtcctgtgatgaatgagtgctctaggcacaaagggcctttgttacaaaccggttatatttaatgtgttggtatgcattctgggatccagaggttgtattccagtaaagctgcaaatgcaggatgctatgctggacccagtccctctatgcatccctgcactggtccatgagaattgacgataaataggaattgccttggcaaaatgtcagtctgagaagtttctctctgacatcctgggcatccttctttttgtccttcccatcccactctccaacacagtggcagccccctctgccccttgtctttctctttcctagaccttcctagtttccacctccttctcctcccaaatctgagcctgtctcatatcatcatacattcccttgatttattgagtgattacattttactgagaattaacatctatcatggttactccaaccaagtattttcattttcaagggctttatctcaaattgttacaaactaaaggaatttctgacattggcaggcaggtgaataactggggtggtagagggaactatgcaattgcacttaaaagttggctctgcagatgagcctactctaagcatattaaggaatttgtgagtgtgggtgatgtttagaaaaaaatggtctctggtctctccccagcatgcggtcccttgtccctgggagggatgactctgctttggctgcttgaggcctgatcatggacttttagggatggtgacgatgtcccaccacccgtggcttctcaggtggcctgtggtccttcccgccctagcttgagttcactcaggaggctgttctttctagggtcacactgcccctctttctttcactgctgacccacagagcagggtcccttctgtccctcttgcagccttagcatccctatcccctcctgaagtcctaaatgtagcttttgtgctttggggtatattcccgttacttaatgatgatttacaatgtcatgctcctgcccttgtgtctggacatcaatccctacatggccttaagcatttgcctttggtggcaaaatttctgacaactaagtttgtcttaggaatgcatggtcttaatgcaaaaaaaaaaaagaaaagaaaaaaaaaggctaaaatgtatacccttgaatgatatattaaaaaaataccagatggaatttgagttggttcttatctgacctctttttaaatgagggccaaatgttgaggaaaagcatgttaaaatttttaaactaactatttacaatgatattgaaatttaaaggtaaactgtactaactccttcaagtttacacacaaggagtttacattcagccaaaacattctttgaacgaatcagattaggaccattatcattgatgtaatttataaaatcacttaaaataaccaaaaatagtttttaacacatttcaaacagatttttcttaaaaacaaaacaaaacaaaacaaagcagtcttttgattaaagagaaaaggtgccccactcctaaggaaactaaatacacttaggagaaaaagaactttgctgaagctgcttgctatttaccacatatttttataactaataaatgcctttgctccccaccttcctgctctacttccttctcccaaaggtttctcagagcataaccacactatgctttattctgctgtttttctgaagctagggtaaaagcagtcttaaaaacacatgcttcaaacctcatctggtcctctctctgaccgttccagcccttgactttgaaaatgacttaatttgtagacgcaacaattagcatgacaagcaccaaatgagtttctgaagcatttgaaaattttttcattgtctgagtaagcggcagcatctgtatgtggtgtaatttgtatttgcaggacgtggaggcgaatacagtcagacttaaagaacatgaccaagatgtcttggtgctggagaaggtcccagcagggaacagagcttctaatcaaggaaactcacagcctcagcaaaagtatgtttgcatccaacactgtaattgccagactatgattaaccttttcacatggtatcatcatttctacaatagcatgttctccttttttgtggaagatggcagtgtatgtgacttttttcctctctattgactaatcacacatcttgtggagtataatgtatccatttctggcacagcattgagccgggtgctgcctagagtaattcgggagagaatattcctttactctaaaaaccactctttgtatacagtgttcaactgtaatagctgtggaacagaaggcgtgtgagagaacaatgggaatagcaatgccaggcagctcaaaggatatgaaggcccctgggtgatgagaacttttggtatttgaatttcgtatgcaggatttcgcgtgaagtgttttcctcttgttatcagaatgagcgtctttgatggaaacccagacttccaatataaaacagtctattgatttcagcccagaagcatccatttggcctcattcatactttcctgctaatgtcaaaaggccattagcttcacatttctcagatgtcctgtttaacttgagtctttttcagcataccgatgttcagttccagcttttgctgcaacttactacataagactgcatcaaatgtaccaacatttgagtggtaagacagaatagaaaatgtggctctaagaaattacagaaaattgcagaatctagtttttaaaatggagattaattttcaatcttagtgtaataaaaacaccaattctgtagctaaagaaatgttgcccaataatatgttgaaggagaatgcatctcaagtaattttcctttgtttgccaaataagcaagatgtttcctttatcaaggcattcaccataaatgattaatttttattgtttagactaaaagtctaaggcccagacattttcatttgggtgaatcaacatatttgcaaagagggcaggaaaaaagataatattattaaatagccatagtatattttgcagattttataggattcttatcatattacaacaccttttaaaagatggagaaatttatgctcagagccacaagttacttgcccaaggtctcaaagcttgtaatggcagagcttggattcaagtccagcttgaccagttttcacatgcctatcccccttccacctgacagcttactataacaaaatatagtagataagactacatactcaacactgtttagtaaatattgcaaaccactccatatcgaaagaactgacatcaaaaggactatgtaaaaaaactacctgtcacttacaaaactataaaattaccatagaaatttccttattatttattgttttctactgtctgttcttgaaattgttcttgcccaaatgtttttaacagttttccttccagtccactaaggaggataagaatgaaaacatttttttaatgtgaaggttgggactgcttctagtgattttctttggttcccttaaatacctggtgttttatctgtattttaaactaatgcttcagatgtctggggaaaattatgcttactgaaaaggcaagccttgagaattctccttaacctagaaacatctgatcaagaggttccctggaggtccccttgcttgacttcttcatgtcattggggaatgatcaaaagcatttgcctgttacaatggctttcattcagggtgttctccaaatataggtttcttatgaaatcaaactaaaaggaatggaaaagaagagaccgtatgttttattattttaggcctgatctgattttctattatatctccttatttgtgtcctgtattccaatccaaatttcttccgcaattcaaaaacttatgcatgttcacaatgagccatttaagaaatatcagtgagtacaaattaatgtaccacacataatcatttccctgaagaatgaaaagctgctctctcaaggggtcattttccatgttgagctttcccaaatgagaccagagttgaaggggaggggggcatgtagataaatatggggctgatattccggacttcaaaaatgtggcatcaaccatgtgtatggatggacttaaaatttaggaagctgtagggcctctcctcagaaattatcctttttgagctcaaaaagggtcaccatgttggtgctgctaataatgttatttttctggttcatttttttccctgaaaaatccagaatagtttatgtgcacatttttaactttcaaaacctcctgactctacctaagcatctcaactctgagtgtgatattaaaaatgtcaataataagacaatatttgccatgaaggataaattccatggagcccttagtcgtttactgtttcgcatgtctttctgctgtgtggttatgcgggtttagtaagaaagaatttgaaatgcatattcctgttttcgttactgtgttgcttttatcttagactgttttctcattgctcaactccatcctgtgtgcaggaagacagtctctttcaggtccccttctccacacccttctctattctaggaacagattgtagtgtcctcatttgcagaaaaatattttatgtcagaggtttaaaacttcatagcttatataatgtaaccaattggagtttgcttttaacttggactagagtcgctctttcatgaaataaactgaaaagggtcatgctgtgtggtcttcaagtggtcctgacctcattttaaacagaggccaagcagtaggtgcctggcagtggacagtgggaaacaaagccgtcacgtgatgtttcagccaaacccagaaccccaagaacccagagggctgtgtctggccagaagttcctggcccctccatcttggagtcccccaccctaagggaatgttagcacctaatagccttctgtggagctgtgaagagaagctggggtaaggtggccacagcaactgtaccacgagaggaagtctttggtagcaaaagaaagatcctgggggtctccgactggccaggtgggcagagcttagagaggccactttctagagaggtgatcaggcatctggcttgcctctcagatctctattacttttgaccagccataatgccctagctaaaggatgtccaaacaaagaataccagaatgtgaagccaaccttctagtagaattaaacttttgacaaggggacacattttacaaactgatgtatgagtcacacggctagctatagagcttgcaacttcccagcagcctggtgccacgcgaagtaacagactggttttccccccattcagttttcatgttatggaatgtacatatactcctattgaaataaaactcgttttcagaaacaaactgaacaagccctctttagaggaaggttgttaattacatggagaatttcctgttctgaaaaagctccaggtagctagacctggtctccatgtggagcgtcttgctgtacaagcagaaaagtgccatgaaactcatgcttgttctctgaagccagacacacctggctcatgtcagaggtctcccatttactaactctgtgacctgaggcatgatgcctccccgtcctgagcggtctctccatctgcagaatgaagataatatttaactagcaggagtaaacaggacgaccttattcagtgcccacctagctgtctagggcatagtaaacattcgacagatgttgctctctctaaccccgtttcctgattaatgtggccaacgctactcttcttccagctcatctggtgagtgctatcaaagaatcatatatttcaggaattactgaattaattgagcaatattctctatttcaatatcgaaagtcatttataaatatgccctcttctttcctcaaatatgcattgcccacaagaggaaaaaccattgtcttctaccttatctcttttgagaaaggggtcagacttttgagatgaaagtagactattttttttttctattccccttctctcctcctctaggctccaaagccaggtttcctcaaagacttaactgtttagcttccttttggtcttgtgcgcgcactatagttttagctaacagctgccttccagatagactgcattggccacctcattcaataccagaggtgctcccctcaccattttcacatgcacatatgttaaaatgtctgcacatcactccctcaggccatgggttaagatcctgagatttaacaatatgttaagagttactcttgggatctcaacacacctcaaaagtctcaaacaggcaaggaaaccagagctgaattctcactgctttctgaacattagacaattttattttcattgttgtttttacttgcctgtttgtgtgtgtgtgtgtgtgtgtgtgtgtgtgtgtgtgtgtgtgtgtttgtattttgagatggagtcttgctgtcacccaggcaggagtgcagtggtgtgatctccgctcactgcagcctccgcctcccgggttcaagcaattctcctgcctcagcctcctaactagctgggactacaggcatgtgccaccacgcccagctaattttttgtattttagtagagacggggcttcaccgtgttgcccaggctggttgcgaacttctgagctcaggcaatccgcccgcctcggcctcccaaagtgctaggattacagacgtgagccactgcgcctggcccctacttgcctgttatttttaagtgaaattccaagcagaaaagcaaagcctgagttttggaagagaagcactcagatcatctgaatgtattttgtctacagctcccacatagtagtgttttgtcactgtcttgagtatgattttgaaacagttcacatgcaacttaaaaaataaatcctcctgtgttaattgaagaacaccatggaaagatcttctgaaataatgtctaatataacccccagtaatttatatctggcattgaaataaattataaggattttctactgctgatttatttcccattcatgatctactggggtttgtttgtttgctcatcagtgttatggggttttgtttgctttctctcgttttattattagctgaatttccaaagcacataccagtgtacagttgggaaagacagagcattccagaaataggcgggggaatccagtgtgggaagaagttttgctatgagtaacccatatatggataacctagcttactctcacttcccctcaccagctccccctgcctgacctgaactgccctgggttttacatgttcctttttattctcctttggaaaaaagactgaagtttctcagttcccagcctgctaaagctgctcttcaagaagtttaccttatttccatatagggaaaaaagaacagtgtttgtagtaacgacttcactttgtgggttttctgtttgtttgttttgtcttcttgtgtgactttgacaaagtgtgtggtctctcttaccatgaaaggtatatggttccctgggatctcaaattaaaaaaaaaaaaaacttagataagtaaaagtttttttaatgatttgcccacttttgaaaaattaatggcatttttgtttcttatccaggtatactgtgatgtcaggaacacctgaaaaaattttagagcattttctagaaacaatacgccttgaggcaactttaaatgaagcaacaggtatacacatagaaccgtttgcatgtccattaaatccatgcatagcattgtttaaaagtcctgaattcatttgcagtgtgtatagcgaaagcagtttgggaaggggattctgtgtattgatatttgaaaagcatctctgtgtgacctgactgggaacagtccttctgactgtcgtcttccctccccaatcctgactgttctctagaaatgactcagcctcatttctacatactatgcctcatcttccctaggcatctctctcttaagttattcaaatcccaccttctataggcatctattgggtttatcatacatcctacctattcccacgaaggatttgaagctgcctacataaaaggtacagccttgctccagttgggagtaagatacttctctctgcagttgttgtagagtccagctgctctagaatataactaaatgccaccattcgtttgctagggctgccctaatgaactaccaccaactgggtagctcaagcaacaaaattatattgtcttacagttctagaggctagaaatcctagctgaaggtgatatttgggttggttccttttgaaggctgtgaaggagaatctgttccatgcctctctcctagcctcctgtggtttgcaggctatctttggcatcctttggcttgtagatgcatcatccggatctctgccctcatgttcacacagcattctccctgtgactcttcacatagccttccctctgtgcctgtctgtctctgggtccaaggttacccctttttataaggatggcagtcatattggattaaggccctcattaaggacctcaccttaacttgaccacatctgcaaagaccctatttccaaagacgattatattctgagatactggaggttagttcttcaacatatctttttggggggatacaattcaacacataacatctgcttacagtgagtcagtcttgttacctaagacacagaaattctagggtgaataaaacaaatctcaccagtgaactaagtgttcagagttataaaattgtgttccactttggttaccatcttgtatatgactttgcaacagcccacacgcaacgtgttttttttttaatcctatgctactgcctgtctctcagaataatgttgtgggttaatattttaagcacattgagctccatagaagagcctttctcactaaaagaagttcagagatttatctcaaaaacttagttcaaaatccatttccataattgacctttgctatatattcaagttgaagatatcattattattattatatacctcctaaaggtattttaccactgaattcttattttatcttctcattccagtttctcattttatacatagattacctgaggttttttatgtagcaaattaattagggtatagtagatataatcgtcaggatcactggctccaggccaattattctcaggtcaatatttgttgagtatcttgttgggcagacactaagctagatgctttggactaggcaatgtgaacaaggaatcattctcctgccttcaggaagcttataatctgttagaagacataaaggaatgtgcacataacttgaatataaggcagaatgtggttagtgcttcagggacactgactaggtgagggatctagaaaagtatcatggaaaatatagagtggccctgaaggaggctggtaaccagtaattagagatagggacaaagccatccatactaagggataatattagcactgacctagaaatagacagggaagagtgagtggtcggatttttactggactattgtatacgtaagttggaaaacgaaggaaaggtttaagaattggggtatagatcttagagagtcttaaatgtaaagccggctgggtgcagtggctcatgcctgtaatcccagcactttgggggccaaggcgggaggatcactggagcccaggagtttgaggctacagtgagctatgatcatgccactgcactccagcttgcacaacaacaacaaaaaggtagagccaagcactgggaagtggttgaagatgtctgagcaagaagaacatgataagaactatgctggagaaaagttactccatatttagtatagagaaactgttgaagaaccggttatgtgaggatagctaccaagagccatatgtaacctcaaataaaccaaatttccaggaccatgggtcaggaaaaaatgcagctgattttttccctctgattaactgtttgcccagaatgtgtgattgcataatgcaagaatcagcatcttacctaaggtatatattgactcaaaaaaatatatattctggtacattagagactgtggcatctaaggaatgagctataagatctttaccacccatgaagggcaagtatagccttcctttcaagtcacctctaaaagagatggagattggattattgctgctgcttctgcttcttttgtttagttttgtttttttaattactgttccttgcagagcagggctaacccatgggcagtgtgccaagagtagcctgattatttcttcttcatcaaaaaaattaaagcctagaaatcagtgtattctaaggctggcgtgtgggatgtgattcttgacccttccatttttgatggtagagactaggctaacatcataatttaatattgaacttcatttcctgcagtttttcctgatatttttttcctacaagtaatgtttatgccttggagataaagaacaaaccagtatctttctcataaatcagaaatacaaatgtgcctccctcctgtcctggacactaaataatcctagggtaggtccacgaaatttgtggatataccagagtaggagacctttggcagttatagatttacagtacagtaagaaaggtcagagttaccgtgaaagttgtttacatcataaaaatgcacactgctgaatttgacattacactctcttaatttaccaaaaatctgttttctacctgagacctattagttcttatatttttacttttaaaaccagcattagtcatggagtgacttggtaaatcatcttctagtaggaagtgatgttttaaattagttcttaagcaaattttaacctataaattagatttccagtgttcatgtttttgatgaacttacattggcaaagtctgaatcagtgactaaatgtttaaccatgattctcatttaaatataagtgatgagtgtaatcccaagctgtcatcactcagtgtcaccagtcaccttcagtctcattatactgagaagcagagaaggtgccagacagaagagttgctacatgtgaggagagagccggaaagccacactgaaatgtgagctgagtggttggccatgttaactgactccctccccagccttggagcacccaagtcaagtctctgctttagcaaactttaaactactggatattacagcctcctgggtgcatataagcaagtattacctactctgttctcaagaatatataaaacatatcaagatggtgctagatgttaagctcaggcaagccaaaatcctttggtacattaaaaaaaatattttcttgcagcctctgtctgacaccttctctgcttcttctctggctcagtataacgggactgaagacctggtgacattgagttgtgacagcttggtattacactcatcagttatatttaaatgactatgtataatggttaaacctttagtaactgactcagacttcaccaataaaatttcattaaaaacatggacaacatttggcaatctaatttatagcattaaaatgtacgtatttctcaccattttccatttaagatgagcgtcacaatctcagacagtgtatttcatgttttcccgggaaatgtcatggcatcttgggttccaagttctgatgggcatagtcctgaggtttttaggtttgccttcatgagctttcccatctggctagccagggcatgttgtctgcaatgaagaaccagcatcaaattcaatgatgaagtaaatgaagcttatttgggggacctgccttacttcccttgccaaccccctgcttccttacctacaaaatagtttcacatataggacagtcaccatttgaatccaccagcttctgttttgttagcctttgttttgctctagttgctgctcacagccttaatcttgttttctttctttcttttctttctttcttttttttttttttttgctgcttctttctcccctcaccaattctctgctcttaccacgtcctgattctgtaattctattgtcctcctacctttcattgcttcttttggaaataggaggtgaaaaagacataaaagagaaaggattttgaaaaaacaaatacggtatagacaaagaaacgaccatgtcttcgttctgcatgtatggtactgcccacatgtgaccctttaagtacacagattttaaaatctttggtggctaaggtacccagtgccgtttgtacaaggctgtctctctttaaaatattatactttttgtccattgtcataagaaactgattttcatctcaatctctgtcaacaccattatttatatgaagtgcttccatgtaaagtaaactcatgccccaaaccaatgtgttagaaccaatgactaagaacaagtgaatggatactcttgctttcctaaagatttccacaagaacctaatttccttttctgtttttttccccttccagattctgttttaaatgactttattatgatgcactgtgtttttatgccaaatacccagctttgcccggcactggtggcccaatatccttttattgtgattgtaagtccctattccctcgaagacaaccccccctatcgagggccattcttatctcatcttctgcaggtaagtcatggcccaggcagagttgtgcattccaccctcatcacactgaaatgtgttttcccacatttcccacagttttcccctgtacagactctagctctgcctggcagaggtctgctgtgccatgtttaaggatttcctccttgttacctgtattgggccattctttcattgctataaagaaatacccgaggctgggtaatttataagaaaagaggtttaattgactggcagttctgctaggaagtatcgtgccagcctctgtttctggggaggacttggggaagttacaattgtggctgaaggtgaagggggagcaggagcgaggtgggggaggtggcaaacacttttaaacgaccagatctcatgagaattcactatctcaaggacagcaccaagacacgaggggtccacccccatgaaccaaacacctcccaccaggcccacctccagcattgaggattacatttcaacatgagatatgggcagggacaaacatccaaactgtaccattatctgtgcagagaagtgtgaaccagcttaccacaggaaggtgatgctggcaaaaaaaaaaaaaaaaaaaaaatccattgcctgggaggcaggctagaaagggttatggagaagaacctgggagtattagcaggaatggttccctaacctcagagacagactgttccctggcagggtggactgtggtcggcttgtgttcctcctccgagctatggtattaaattgctaagctgctgagataaatacaagttatcactgtaggataactttcttttcccattcatcctcgtctatcctctcctctagataccaaaatttctttctttgttactactttttattatcatcttactgacttaaagacccaaaatttgaaactccagtgacaattcctctctatagcttgaaggccaagtttatttgggacagcttttcaacagtgtttggaatggcccagttgatgctggtatgtagcacagagcaaacattctcagaaaatgggagtggaataaaagaagtgggtattattaataagcttcacactcaattttgggagcatgtgaaagtatattctaagattttgttttatttttagaacaacaaaaatttagaccccaaatcactttggcccttttgagcagttaaatatattgaaggagaatgactcttttattctttctttttttttttttttaggaattcagtgaatgttggcatgttttcctcattcaagattataattaccctacctgattctcattttcttgttcactcataattctctttgaagtaaacaatgtatgaggacaggagatttgagttgaaggtgcaactcagaggcagcttcaagagggagatttgtgtgtttatttgcctggaaactgttttaccgagtaatgatggcttaatgagacttacatacattatatattttttctggcacatactcaatttttctcgagtaaaatgaacaaattcaggatgtctgtgctcttttaactccatacgcactaatcattatagacctttgagatttgctggaaggaaaaataaaatccaccattgagtttagacttggttttttttagcagataagcctaaggcaaacaaaactcaagggcgagtcagcgagttcagcgggccaaggcccggcatctttacaagtccaagccccaaacactgcgcttgtctttttttttttcagattctaacttcttcgtgtattagcttgttccccttcaagggttgactgagaacattcaaatcactaacttctctttttaaaatagcgctctggagagaaggtccgttccatgcccaggtagggaggagggggaaaaatgatactggcgggcagggagaggggaaggcaagaaagcaaacaggcgtggaagagctgtgacgtcaaatctgacttcttttgtctgtagacgggggaatccagggtgactgggtataatctgtattatctaggtccctcagaccacctggctcatatctggccctgtgggaacttagattctcttcactgttctattttgaatcagctctgtctgtgtcaggtgcatgctaagagcattgaccaatattataccactctatcctggcaggattctattgggttagtattagctttgtgttacaaatcagggtcctgaagttacccccagcccccacaaaaaaacaaaaaaggagtggcttgcccagggcaaatagctgagttctccagatgattccaaacctggagtttgccttttttttttctctctctctcttcacaacttatttatttgaaagcttgtttaaattttaatgattctgtaacctttaattagagtttaagaacatttcaagacactatattgcatcataaactgcttaacagaacacctgcaagcaacagggatgtataatgcaaacttgaacaagtggtttaacccctatgtttttaacgtgggatattagggatagtaaaatacttaactatgtttcattagtcagttgctttagtggagtatttttaaagtgcttaacatctggaacttttcatagcagccctatgaagaagtcagtatttttactgctatttttctaaatcaataaactagaataatgaaaacttatgaattgctcagagaaaggtaattactagcagagaaaagatttgagccctgagctactgacacgtatttctgttcttaatccacattgtgtgtctcttccagttttgcttttaccatggagaaagatagtagaactctgctgaacattaatatatcaggccttttatgtgctaatgagagagactctctattcattagacacagtttggacatgatttgacccgatgaatacaagtactttataatgagtttgaaaatcatatttgttcaatttctatacttttcatctccaggttctttaatccttttttaaatctgcatttaaaattgagttcaattttcctttagtcttcaaaagaaaattaaaaccacctgtatataaccctataacctctcaggtgtactattgctaaccattttgtgtatatccttccagtctttttttctatacatatagatatatgtttttaaatgtaagaatgagatcatactgtaaataattttgtataccttttaattaagcaatattttgtgactatctttttatgtcattatttttctatgccatttttctaaatatagatagttgtcatccttaaaaataaaacattctcattacaaaaaattttaattaccacaaaaggagaagagagcaaagttcacctggcatctcaccaccattaataaatttgtttttaaaattttagaatttatatatacatttttatgttcataagattttatataaattaaataatgttacatgtgctttttggtaatatgctgtttttcacttggtggtatattgtgaatatctttccaaactaatatatatatagataaaactgcatcatcttttttttcttctagatgtttccataaacatttactgactactggaaatgtgtcacatagagtactgggcaacaagggggcaaagatatgtgagaaagacacattatcatttttaatgactattatattaatagatatgtcataattattttctcagcctctacctattggatatttagattatttccacggtttttttcttttttttttgctataacaaacacaatggagtgaatcagcatccttccagctaaatctttgctcatgtatatgaaaatgtacacactttaaattcctaaaaataggcaaagaatatgtagtatgttaatgcttctgatgtgtattcccaaattactctcctattgtctcaatttagtgctttgtgattaaactctgccatattcttgtttgtacaactccaggctggccttcagtttagtaagtgatcacaacgaagtcaatactattttgaattttaataactctctttgattcagagtattttcacattatttactttatctttccaacaccagttctccaaatgtaaagcaaaaaagtctggtatattatttttgttgttgttgttgttgttttgtgtttttttttttttttttttttgagacagagtcttgctctgtcaccaggctggagtgtagtatcgcaatcttggctcactgcaacctccgcctcctgggttcaagcaattctcctgcctcagcctcccgagtagctggaactacaggcacgcaccaccacacccagctaatttttttatttttagtagagatggagtttcaccatgttggccaggatggcctcgacctcttgacctcgtgatctgcctgccttggcctcccaaagtgctgggattacaggcatgagccaccatgcctggtatttatttcatttcacatataggagaaatcaaggtacagggaggtctaataactgcccgagatcctgcatatactggtagacatttggaggaagtccgtgtagcactgatgtaatggacattgtggttgatttgccaacattcatgccttattactcggtattctagccactcgtagtaattagcctcacttgccaaagactggttctgcaacgccagactctagctagactgggccaatggaattcaaagagaggcttcctgggcttttgggtgaaaacctttttaacatttaggagaaaaaaacaggaagcctataactccaattgccagcagcagctatcttacaaccatgatgggaatgaaccccaagataaagctgaaatgaggagacaggaaaaacaggggtctgtgataacatcattagcatttgactggtcctgaagcttactctgccaatagattatctttttatgtcaatgaatgtaggtgtttgttgtttaggacagattcttactgcagctaaaagaatcttaagtatgaatggctgatatttaaacttacagaaattttaaaaagcaataattttggacagttttttttgttagtatactaattttctttagcttagtattcaacacaaattttgtgcttttggcctggaaataatgagtttagtttcttgaattaagaagaaaaaaatatagaacatggatttgccactaagttttagctaaatccaccttttctgtgtttcatccctgtatagaagcaaacacaacagcttccctcactgaaaaattagggtccctgtcataaaaatctttgtgaaattgatctggagatgttctctttataagttgacttgggttttataagtggaacatttatcaaaatctgcttttctttttgatgaaagattcacataatagcagcaggttcatattctttaaatgaagccaagtttttaggaacattttttagatttctaagaaaaactttcaacttaaattttgttgaaaccagattttgtcatcatagtccccatctgattctgaaaagtgtttgatccatatgtcaccgtcagaggaatttgcttctgcagatatgcaatttgagtttgtttccatgaggaagactttgtttggtgatgttatgaacatgatatgctttttgggaaaaaaatgactgtcatcagatatgctaaaaaatatttcatatacatgttctcggcctcatatcaacactatgtactcttttagtcttgtttttcacaatagggaaagtgagcttgagcagctaggtaattggcccctagctacctagctagtaaatgttagaacaagatttgaacccaagcagtgtattgcattagggcacgtcctaactgctgtgctatgagtacaagcccttggcttgagacttaaaaggagaatagccaggaactagagacttctaaaaacacagaggattctgaaaatcagtgggaaaaatattctgagcaagaaaatgggagatatgtaaagaaattgatggtacagaaggcgctcctatgagctcaaagttagtaggtacacacaaacaaaggagcagcctgtgtggataggagtaacatcacagacttaaacccagaaatgccaggtcttatgaaaaattccacaacagtccattgaaaatattttaaatgacttccagagaagaatcagtaataacattggtggctaagatttactgaatacttaatatgtttcagatacatgttttacctgtattatctcatttcatccttgacagcaatcttatgaagtttactgatgaggaaaccaaggctctaaatggtcaattaacttaccaaagatcatacagtttttatataagtagggaagccaggatgggacctaagtagtgtaatttcagaacttgcattttatgaacatgccatatgaaggaagaaatagacgcagtggtcagaatgtcaggctgctccacaaagacaagaagcccagattatagtaaaaaaaagcaaaagctctgaagtaaaaagacctgtgtttaagacctgtgtcctataagctatattactcagcaattatgcttaacctctccaagccccttctgtaaaataggggtaattatatgatacggtctggctctatgtccccacccaaatctcatctcgaattgtaatctgaattttaatccccatgtgttgggggcagaactgtgtgggaggtgattagatcgggtgtggcccccccatgctgttctcgtgatagtgagtgagttctcatgagatctgatggttttataaggggcatttcccaccttcacttggcacttctccttcttggtgccatgtgaaggacatgatggttccccttccaccatgattgtaagtttcctgaggcctccccagccctgtggaactctttcctttataaattatcctagagttgagcagttctttacagcagtgtgagaatggactaatacattatacttgccctacccactttaccaggttgttgtgaaaatcaaatgaggttatgtgtgtgaacatacgttataaaccttaaagtcccatatatatgttgctgttattattataccatcaggagaggaatatggcatgttataaagaatatacaaaagctttgtcttgtcagtgggcagatgacccccaaagtttgttttcagctgcaagcagagatcttgtatgcaaagcagggttttaaaaaacaacaacattgaagagtatcagtttgaatgttgttaagtgttttataaatagctgcataattagcatgtacttactgcaaaaagtatacataatattttattccctgttgtaggctgtaatgaatctgctgcctctacatcctgggaggttttcacttactttccccatgataattttaatacatggaaccattattagctgaattaagaataagtaaatgagcagttaaaaaaaagtacagaaaaattacaggtgcctgtggtgagtaagataataactaggtaaaaatatatgaaataattacagtgtttgaacggcagagccggcatgaggaaaatgactcaatggaatattaagcctgatgttggcagggtagaaaaactgtagcctacactgtggccttcacctcttctgattctcagccctaaagcctcactgcaaacagatccaatctgctctcagtcacatgtacacaatgctgaaggaggtggttcagttccgagaagatttagtcactctgaaagtttgtcatcctgtagattaaatacccaataactgaaagattctatttaaaagatgtaccagatgttttacaattaaattctttatgaatttatttagaatgtacctctgatctgtatttgacatcttgacaagatgggattccgggtaacttaattaaaggctcttaaatagctgtgatatttttaaaggttttttgtttttttagaaaagtgcattagatacagcattccaaacagtgcaaataaattatctgtaatcagttgattaaaaaatattgaaggcttttgtgtgcccagtctttagctagaaagtgcaggaattaacagtgagtttacgacctcgttccttctgttaaggattttgatttaatgcttccagatggtgagaaatactttattacagtttaagtattcctaatctgaaaatccaaaatccaaaatgctccaaaattcgaagtttttttagctctcataccagtaggtataatgcaaacattccaaaatccaaaaaaaaaatctgaaatccaaaaccacttctggtcccaagcctttgggaaaagagatactcaactgtgtaagcaaaacttcaagttggaatttgaatgatcagatttaacagtgtctgctcagtcgcagtgagcccctgctttcctaattgacaggtattaaactatagcagatgggatctcgttcaggtattaacgatttctgtgcctctctatcagattatgaaggctgtaatagttaactcttgattttctgcatgtgctttgttatcaggatttgggggatcaatttctacatctcagatggattttcctatttcccaacaaactttgaagtcatctgactctgctgtataatctatgtttgcataaagaaagtaatgttaacatcagacaaaacacaacaacataggtaaaaagagtactggggaggaaaataagagaactgagttctagttccaagaattcctttgataaatttggaaaaatcacttaaactcattctgcctcagttttcttacctctaaggtgatggagttgaaggaaatgtaatcaaagggctcttgaaacagagatcctgtgattccatgacttacctgaaatcaactcaaatgtgtcagtgataagtttggccacttaaattatatggcctttccttaatggtgtttaaaatactaattcagtaagtaattttagattgccttacagacttttaaaaaactagaactttatgagatataggaaccatgttgtctttctgcatctctttccctatgagttcaggcagccatattgcttctttcctggacccaactgtcatatcatgagtcatggccttattcaataaaagcacttcttgatcatgcattattccaattttagccagagacggcttcttcaaccttcctgatgtgtctgaatttatgaacatgctgtatttgaaatgttactctttttagattgcacttttgacatcatattgagacaagggaactagtaggatattctttattccttggctgctacctgaagggaatatagtttttcccccttcctaccttttttgtaggagttaaataaaagctaaaaattacaaactttctaaaagcctggggagattgttatgggaatgaatagaaacatcagcatctgatctgtaaccatttcaggtataatcaattgtatacaaagttctctctgtgtttcttaagaacctgattcaacagacatttcagaaggggaaccctatgtgttgcctctggaggagcagaatcctttagcaatgcctggattcagctataaaagaagtatcacccccaccctcactttagtaaataaacatccatgaggggacaaatgagactttgtgaaataagtcagcgcttccttttattttcccaggggtaaaaatactgaactttcgtgagaaaagggagaaagcctttcccagtccctccggatttggtcaattctatctccctagaggctgtggggttcttcatcaaagacaaggggtgctcagccctggtgactaaacatgctgaatcagctgcgggaaccttggaacttcagcgcgcgcgcgcacacacacacacacacacacacacacacacacacacacggaatctctttcccattaggctttttgctttccagatgcatttattcttaataatttcatgaacccaagcactaaggtctagttgctatagctgctggttaggatagtgggggtgggaatagtggaaagagccctgtctgaatttgcaagccctgccatttattcactcaacaaccttggccagatctcttctctctgaatctccttttccccaccggtaaatatttcctcctcaggtttgtagaaagcatcatttgatagcataagaatattgacttattttatgaattgtaaagctctatacacatgttatcataacaagtaggaaagaatctttcctctctctctctctccccccactcctcctttctctcttacacatgtgaatacctcctttccaacatgttgtccaatgtaatatttcagatgaataggactgtgcccattgtatcaccagaacctagcatggtgctttactcaaagtagtcggttaattaataattagtgaatcaattggatcaatttgaatagtttctttgcctaagtacttgtaaagcattttgatgtattttctctgaaaagcatattaattcatttgaaaatatatttatttcttaaaaaccacattagcagactccgtctcaaaaaaaaaaaaaccacattagcaccttaattgtcctatcttggggttatttttctaaattgaggctaagtgttcaccactctattactaccagctcagtaaaagcttccctttcctctctatgctgtttccatctttgagtgattcaaaatatgctcatgttgcatgtgtagtgaaatatttttaagattgtagtttatagagtaacttagggcacagtgtgacattcttttaaattggcatgatctgagagagaattaaatttgctcatttttcacagtacaaggccatcagaaaggttgtctttcacaggcactatcacttagacttagaagagggactagagggaagaagcctagcctcaggtacccggtgaggaacacgcatggtccatagtggcatcaggatatttgggacagcagtctagggagcgagcccagcctaatgggagctttgacacataccgtactcagaattcagaatctccactgactcttacatttataggggttggcattcctcagcccacacccctactccccaccttggccattcttactttctccatttggctcctatgccatggaaatgaaaaagatagcacctgccaaagcctgatgtcatccaagtttctgcacaaacacaagataccataaaactaaaccaaagaaagcacagtggcaacgtagcattgtattttcattatgttagtttgtggcacctatctgattctccttcggttcaccttgccttagcgttattaaatgcggtagctgaaagagaatttggaaatgatttcttctcacctcctcatttcatggagagtaaatggaagtctacagtggctaagtgacttacacaatatcacatagctaaatggtggcagctagaggacttgaacccagatcctcccactctcgggtgaaccagtacatatttttcaatcagtcaagactttcctatttggtacctaccatgcatctgactatgctcctacgtgccattaaaaaatggtcataaaatataatgtccagcattgcaactctttggaaagaaaaactcagttataaatgcatgcaagcaagagaccaaagagttaatcagaaaagaaataattttcacataaagcgatctttcttcctttcttcattgtgagctgagagaggattgtagcaatacaggttgagcaattttcttttttatgaatctcgtgctcaatttatgaaagccattttgcaacccatttacatgcagtaaacctttgccttaaagttctgtcatttaccttgatcatgattatttatagtccttttagacaaggctctttactggtttagctctcaagcacagcactgtcacaagccagttttctacgtctttcaaggcagggtaggaagctaagacagggccagtcttgtagctcgctgtgaggaatgggggctttgggtaatgggaagaacactagttggcatcaggagtcttgcattcgcaacctctgcactctcactctgtaatcctggccatttatgcttctttagtttcagtttgttcacttatagaaatggagcgacactttcatcacaaggctataaagtggagttgaagtgaagtactttgtgtgcaagttatattgtaaatagtgaagagtaagttgttttatgaactaattatctataatatgaactataaatcattgaaaaaggaatggtgtgtctaacctaaaatatttcttgattacctgtgatgttgtgcctcctgtagagcatacaagaatggaccagggacctttactcttggcacataggagactctcaatcagtacttgttgcattaatgaataaatacagtttctgggtgaaagtcagtatcctaggcgtagtgtagaatacaggacaaatgaccatcatcccaagcctcaaggtgcttacaattaagatggtagccataaatgtgcaaagagccagtaaggtaagtcatggttctacacaagagaagaagatatggtgtaaaaatgtgtctgaggccctcaccagagaattggtacagcaggagcctttcctcttcctacctctgggtgagtttatctacctccagcctctcttgcccacccatgcactctttgtatcagccatggtcccagcaggactagatgccctgctgggcattcagttttactgaaatgcatgtaacaaaggggattacagagattcgggcagaattttggaaaccaacaacgggtggaaatgcacccagagagaagcaatggcaagaaacattaccacccagagtagcaaagggcaaggcagatcctggcagagaatgacagctagagctagacacaagaatccttgtccacaccaagtccaggaggagtctgtgaaagtctaatcccttgggcaactatcaggccagagtcagcaggagtaaacaaggaattgcatgcattcggcacagacactttctgtggggtttttcatgagggcctaggggaggaattctatccatctaaaagcctggctttctgaagctgggatctgtcactctttacctttgaaagtagcatgtgaaatgagtgtgaaatggctcaatttcttccttgactcctcggcacctaccacgcacagccttcacaaggtacagaacaggagaaaatggattatgccctcaacaataagaggcgagtcatccgcctggttctacagtgggctgccatgtatggagacctcctgcaagaggatgacgtgtctatggccttcctggaggtaggcaggggtcatctcttccaagaatatactgttgtcctgcaatacagggacctacttataggctcagcagcttccctggagagaccgtaattgcaaatgctagactttgtgaacacattcattcatcagaaaggaactacagaaaaagtaaggaaaaaatttacccattattctgccattctgactccctaatgggtagcattttcatgtattttcatctagtctctttttctttgtatgttttatcttgtagtcacgtagcacccatcattctgcaggctgctttttccatttatttgatataaggatttttctgtcagtacagtccttataataaaaatttatttacatctcctgaagtaatcaaaaaaatatctaatgaccattgagtagccatgtcacagatatatttatgtgttcccttattgttgagtgttcacatcatttccagttttcaccttcctagaatagtagtacggtaaaaagtcttgtgcaagtgattctgtccttgattaccttcctagaaatgggattactagatcaaatggtagatatttttgagtggagtggagcagatcatttatttaggaattgctagaactggaaatggtaggctgtgaaagtggttcataaacactgttgaaagctgcacttccccgttccttcccgtagctctagccccaaattacagcactgattctgacatttaagctcaattagtcgctctcccctccaaaatttggatgaagacctgacttctgttcaggcaaaaggcaatgttacttccgtttcaaactttttcagtctgtgttctaaaattataaattatccaaaagaaacatacaccgtctctcctttctattcatatcatttcacagccagaggtgcgaggcagtgaggaaagatggaccgagagcatccctccaagctgaggaatgaagtattttgaaaatgcgaggaatggcggtagcttggggtcatacattgactcatggcctctacccgctgagtacaggaccattttgtagatgaactaaagtggtggtgtagctggcactgccatggttctcaccttctgctgcagagcaggcacacctacagctgcagggtcaggacagttcccagaagggcatcagagagtcctgagttggtggcacaaactcatcataaattcgctacagtgctgaagaccatgctgcatcttaccaccaaccatgacccagaatgagtgacacctagtcaataaacaatacataccaaaataatgtgaaaacgaacattaaaattcccctgagaaaaatgaactaaaaaaagcactcttttgtggactccaaaatgacccatttcaaaacattggctttcatataaatatcatataaacagttcacctgcaatttactttgaattgaatttttattgttgtaaaatagatatctaatataaattttcccattgtaaccatttttaggtgtatagttcagtggcattcatttcatttctgatatccgtgcagtcattgattgccactatttccaaaattttttctcatggccaattttgaacttagacatagtgtaacattttcttctttgttcttcctccagtccatgaagccatggtctggagatgctggtgaagcagatgacatagggacacatctttattgctcttgacagaatcatgtgccttttgcagttcttgttaaaagcctgtgacttttgccaattacaggagttttatgtatctgtatcagatgatgcccggatgattgctgccctcaaggagcaactgccagagttggagaagattgtcaagcaaatgtaaggaagggcttgactgtgggggtgtgctttcatcaagtaaatctcaaaaagtcctttgcccacaagaaaggttaaagctggtctttccatagccatgccccgcttgatttgatttaagcagactgggctgagggcataggtggtgcagtaaggccagaggaacagaaggactgagattctgttcattctgtgctagagggctgccaaaagatagcctgggaaagaaaagatcctcctgggtggagtccaactcaataaacctgggtcccttaggttcaaggcagtgaatctggcaataaaatggccagcggcatttaaagaaagtttgagggcaactacttatatggaaaattcactaactgctgccaaagctgttggtggtgaatatttgtgtcctctcaatgaaccagaaggttttcacatgctattacttgaactatagattaaatgcagtatcagagagtgagtgtgctgctagatagactttgaaagctagaaatcctggctttgaacatcggttctgccaggaatctgcctgtgacaagagctgatatctttgctgtctacccttctgctttgatctattactattaaaatgaggaagctcatattgtctcctgaaaggattctgtgattgtgatttcattttctaacataagattagttatatacaaataaggcaatttaatagtagcaatggtattaaataatgtgctttctctacttctcgtagctcagaagatgcaaaggcaccacaaaagaaggtaggtggcatgaacttgcattctctgtctgtgtcctgtagaattacaattccccagaaatattatattgcagtatacataaaagtgatttcttttttgtagacgtgaaatatattgtcttcatttcttgactctgcttgcttctcagatgtgtcttctctgagatgctagcatgcattggtcactgtcccttatggcacttgctgtggttgtttttacagcacaaggttcttttgcaacagttcaatacgggcgatgagagagcccagaagcgccagcctatccgcggctctgatgaaggtgagaaccctcttccaactaactcgtagttgtatagattatttagtcaggataatggtaagcatcaccttggacccacagaatagcttcttttgaagatgccctgttgccctccagatggtttgcttggaggtgccctttggtggcccgattatttatgtccttaaactcttgtgcctgaagccgagatgcctgtctacctttccctgatttggcctctccctgcttaacccctttccttggaggaaatgaagatgatctcagggcctggttgtcaggattgcccacccctgggaaaagctggtgggaaggtagctggcgcctagtgggtgccaaggagacaatggatcaccagcatcctgcccagggacaatgctctggccctgagcccagccctgagcagggaggctttacatcaggaagatcaagatgctggcttttgtttggttatttaagattctccaaagaatcacaaccaaaaatagtcacaataataatgataaaaatttcatttaaagctataaataaatcttgtcatttaggactgcctctaaacccaggaattataatataataatgggaattgctcccaggatttttgtgttcagagttgagcctctgggtgccatatccagatctgctgatctaagtctgctgagctaaatagcatccgagcttacatggcctggccccaaagcacacaagccactgaagcaagtgagcaggagtgtcagcacgtgctcatggcccaggcggaagccctcctgtgtgcagagaggtgaatggtgtctccccactgccacacagggtagcagtgatctgtgaattgcctacagtatagcacttcagaccctgaacatcagcctgaagatactctcaattttttcccatgacctctttgtggggttttcaccaatatctcttgttcttttaattggacttggcaaccatatgtgcacctattcttagaccaatgctaaggtaagcagtttagaaggggcaggaataggggtaaatgagtatgaataaatacagtaacaaaaatggcaaaatgatgcaaattggagaggatgcctaaacatttttcataactatagttttattgaaaactcttaagagtgatttactaccttgttactgcctttggatagttctgtttaaggtctattgcatggaccacacctacacaaccattcgggtgccagtggccacttcggtgaaggaagtcatcagtgcagttgccgacaagctgggctccggggagggcctgatcatagtcaagatgagttccggaggaggtaacagtcttaattcatattttaggctctgcaaaatgggacattccatccaagcagaaactatgtaaggagttagcgtggtcatgtgaggctcacccagaggatgaactggtgcttatgtatgcttccactaataacagaaacagtatgggtagaggtgggttgggtttctaatgtcccctatctggtaggtacccactctaaatcagaaaggtgactggaactgaggactgtcgtgtagatgttggcctggagttctttcaatttaaactctattcaaaaaagttttaggccttggagccctgaaaaatatgggccccaagaggaaatctagctggacaagctcaaggccatgggtttctacaagtccaaagttggaagtggtcagaagctagttctttgaagctgatgatggtttttctccttactcagtagagaggctaggagcctggctcaaatgaaatgaggaatatttttcctccacgggattacagttcctttcactgtccttgattacatggtgcatttttgaaatgtcatttattcgttcatcacatatttactggccacagtgtggctacgaaggaaagaatgagttagacacagctcacgtccccaggttgttcccaggccagggaggaggtagacggtaagttaaaacaattacagttcatgctggcaagagttttaggaatgaccacatattgtagtgagagactagaggaagcaacagtgaggttcatttctccagtcatgatttgacagccatttggcggaatccttcaggaacaggtgagccatttctgtcatgttttaaggtgaatgattccactgatggaggatttttaaatgcatgttggattttaagatctcccttccatttctgctccagttgcacaaggcccaggatgtctgccctccctgaccccttgtcaccttcccatagatatcccaggtctcaccctcactttctttcagtctttacccaaatgtcagtgtctcactgaagctccctccttcatttgcttcattccctttctaaaatgttaacttcttccccttacacaagcttcctagaccccacccctgtgatatttttttctccttgccttctcactctgtaatctatttcttttctttattgttggcatctcccactatgatgtaatgctttttggagtgggattttttttctgtattgttcccttctgtctccccagtgcctggagcagtttctggcatgcagtaaatacaaaataaatgtttattaaatgaactaattttttaatttttttgacatgttctcatctgaagaactaatttttttaatgtgggaggaggcttaatctagttaatgctattgccctgcaaattagggaataagtgaaaaaacaatagtaaattttgcatctaaaatcatgtgaggtctcagaaacctccaaagtttttaaaaagtgatctttctatgtccaaagtcctgggtgtgattaccatctggaaacataacttgtgagataaatagccaagtgcgggttttatgtgctcagtaattatggttgcagcacaaaactgggtgaattgaccctctggcatctctattcctttttgtggccatttctgaaggcatcctgagtggcgcagggctgcatgaatgccgtcttttttattccgtggatcccttcagtactctattttatgcagtcactctgcgtgttccggtaattcaccaagctggcaatttgttggtgtgattagggcagtgcagcaaatctcagatgtatttaataggcaatctcatgctttttatgttcacagaaaaggtggtgctcaaacctaatgatgtttcagtatttacgacgctcaccattaatggacgcctgtttgcttgcccgcgagagcaattcgattcactggtaggtgtggatggcctgctcagagcagcattgcaatcagaaaaacttgtctggagcctaattttgcagtcacactgaacccagtggctaaaaaatcttgaatggtacttagctttttctttttctgcagtctattaggtaagcctcaggtgttcatttgagatgctcagggcttttgattttcttttgtgaaaattagccaagtagcaccactattagggcataattcagctttcagaactctttgttgtaattcgcctcattggtatgtccccagtttaaatattaagaatctgaatacttacaccaggatggaaataatttttctaaagcaagatatcactatttatcaggctcctttgcattatggcaaagccaccatctgatctaagagaaatgctgttccccaaaagcactttctctaccttatgcagaaaatggcaaagtccagacccttccctaagtctccaaaaacacttgttacccagcatacagacagatctttctgtgaagaaaagactaataggaccacactaataactgagtagcctgctctcttttaagtcggtggtagcatccatttctatttctcctaccagaatttggtatgtaggtgagtagctagtaacatatcttagaaagcctagagggccaattcagagggtagagaaactggtttcttcagtctttggatacacggggtttctcctttaagaaaggcacaagaccgagcgtggtggcgggcgcctgtagtcccagctactcaggaggctgaggcaggagaatggcgtgaacccgggaggcggagcttgcagtgagccaagatggcgccactgcactccagcctgggcaacagagcgagactctgcctcaaaaacaaagaaaagaaaagaaaggcacaagacaagagctagaggtaaactgcatccaattttagggagagagtttacataagggatgcatgagtaggtttcaagtttgatcagatcagctcttatagatatcaagattctcttccttggactttttagaggttgtttcaggctcatcataatcctgattttttgttttagagagtaccattttgtgcactccagtgaggataggtggatttttaccatattttgaattcacttggagaggaacttagcaaatgtggcattagttttcctgctaatccctcatccatcagagcccataagcacgctcacctttcctcaatcaccagccttataagatctgagtctgcctcccgcctttccgtatatttttttagtcatctacattcattgctttctaaataaatatttctcaatactgaaggattggggaaaaaaatgtcataaatgagtcgtgctgccctctcctggaaaggaaagccataaaaagccagttcagcgcagccccattaaaggtgctatgtgacatgttactgcacgggtgctggggactctcttgccagagggttcttggccgcagtgccaaatgacatggcgcagacacagggagtgcagactgtcttcagctccctgtggggcagatactaactttctaaacctctgtttgttggcacacagtcctgcagccttccaagttcttagtccttgctcgtcctctgttttaaggcctctgtcgttggaaggaatgtcctctgcattgagtaccctgggcatgaacttcttccctatcagcgctctgccattcattgtgctgtgagtggccaaaccttacctgcctcacataactgtggacaatgagctccttctctggctttctaaagattccctttgaggacagcccatcgaggaggagtcgcacagaggatgaccctgcagtagagaatgttggccacactctctgatccatccacacatgcttctgcagggtctgctctgtgcttggggctgtgctggcttctgtgagacactaaaccaagtgccccagagcctctgtccttaccgcagttacgctaaagccagagagatgagactaacacaagcagcctggaatagaacaagtcttagtgttcaatgttagccttaaattgtgtggtctataatagaatcagtagagtgctggcaagttagcctagtggttaagggttcagattctgaaactttactcttcacattttatttaagtataaatatcagtacagagcaaattcctataaaactccattgtagtataatgtgattctacttttgtccattcactggttcctcagacttttatttagtacctaccacatcatcgcaggcattgtagatggttctggctctaaaatggtcttgaagacaaaaccatcatggtccttgtacctcagtgagcaaacagtgtagtgaggcacccccgcatgtgaccagtgagaatgcagtgcagcaagggccatagcagagctagacacagagggtgtgggcacacgaggaaaggaagatgctccgggtagcttaccttcaccatctctttgtcactgacaatccacacatcccttttatgtcttagtctcctcatctggaaaatgggaggataacaatgctactctcccaattacccctctccagccttagcaaagaaatcatggctcaaaaaccgtggggagaaaatgcatgggagttctgtgtctgtgggtaagcagctttcagatctgtctgtgcgatgcaggctccacataagctctgctgtgccttatctgtaggacatttccacagggctatgtacaagaaaatggcccaaggaggcgcttcctctggggtccagggtgagcatttatattccccacttctaagggagaagcaccttttgctgctcacattgcctcttccgtggctcatggaaggggtcaacctgccctacgccgggagagagacttggtgagccctgcccactgaaagaaaagttgagactcaacagagctttccgttactctcaaaagggttgcaggagtgatagaccagcatccacgactaaaagaactttgcatatttcttaatattagactcttccctgtgttgttaggtaaacttgtcccccttatgtaaagttataaagcctcaaggaaaagaaggagcaaggtgtactgggtatctccaatcctgaggagagagcaaacagcaggaataacgtaggaggggcagctccgcagagcagcagaagggctgtgttcacagcagctgcaagagggaaggaagaacgtgcaaggccagtttgatcctctgagaggcagtcgtaaaccctaaaatgtataagcttccccaactttttttacctaggacctaccctggttgaaatcattctcctcatttgtttccatatgctacttgcccatcagcttcggttcagttccctaagatttaaaactttggaatcacttttcttccctgtcctctgtcccctgtgtagagtaaattgggagcaacagtatttcgctcctacatccaggtgttgtactgatcacacttttctgtgtatttgcattgctacagcacttcttttttttattatttttttttttttttttgagacggagtctcgctctgtcgcccaggctggagtgcagtggcgggatctcggctcactgcaagctccgcctcccgggttcacgccattctcctgcctcagcctcccaagtagctgggactacaggcgcccgccactacgcccggctaattttttgtatttttagtagagacggggtttcaccgttttagccaggatggtctcgatctcctgacctcgtgatccgcccgcctcggcctcccaaagtgctgggattacaggcgtgagccaccgcgcccggcctgctgcagcacttctagaaagtgaactgatttgggggaggggacctcttttgtgccaggcactgtatttacatgattcactgaaatcactcctatccagttctcttaacaagcctaggtataggtatcatgaccccaatttaccagagctggaaacagacactcaagagattagggaatcaatccaagtctacacagttagagtagggtttatattcagagtcacttgctctctaaagctgacactaacctggtctattatctagtctattacaaaacacaaactcctaatctggtacacgaagatgtgctactaactgttcacactgtccatggggaccccctgtgctctctgctcctgccaagcaagtttcatgacagcttccccatcttcatgctcttgttgccatccttccaccccaagggaccatcctggatgctcagggaaaaccttgctattctcacctgcccaagcttgtctgcttcatcttttaaagcccagcttcttcaagatcctgttcagaccacacattcattccaaatacccaataacttcccaaaaattcattcatgttcccctcctgtttatctctgtacctgggtgtcacatgtgttgttgcttctgtccctttatacctgcaaataaggaccagcagcagatgctgcctctgtggagtgctgtatgggccagacagggttgattcccttcaactgtaaccttgcttggtcctctcttagactgtaaacttccaaatgcaagcaccgtctacctgcagaacatgtaatttctctagtgcccagaatgcagtgggagtttgtagaatacagtgatgatgatgaaaatgatgatggaacttgtataatattaggacttctgacatggatagtatctaaatatagttagcatcattttgtttttattttttattttattttatttttttggagatggagtctcattctgtcgcccaggctggggtgcagtggcacgatctcggctcactgcaacctctgcctcctgggtttaagcgattctcctgcctcagcctcccgagtagctggcactacaggtacatgccactacgcccagctaatttttgtattttcagtagagacagggtttcgccatgttggccaggcttgtcttgaactactgacctcaggtgatccacccgccttggcctcccagagtgctgggattacaggcgtgagccactgtgccagccacttttgtgacttttggaactttgtaatgtgtgtgttgcctatttatatataaatctattgcattatacgtgtgcttcctatatatgcatatcattcatctcactaagtaaaaacactttagatcatttctcataaaataaaactgagataagcaagtcagatggaaacttttagtgaggggtcttccagaaagtagcagacgttggctttctaatgtctagcccaaaacaccataaccatgcgaataacatcctcagctcaacatctgcccaagagtagagggatcagacatcatgtgtaacctcagttcacagagctttccattccctcatgaccccaggcagtgtgtcccaagagatggagaggcagcagtgttaccatggccaccggcagcaggaagtagcactgtggatgaacgtcccaaactgccatgccgttacctgctttacagcagcttcagtgagaaataggagaaaaaaggtctcccaggacttcttccatttttaccagggaaaagaagagtttccagggacctcccaggcctgagtgtgagagaagagaacctctgcaggtcactcttcactgaatcttatttgccgcggttcacatttttcagtcagtggaattgatggtaatgatgattggtgacttacagacgacactaaagcaactagcgttgcgagcagaggcatctctcctcagagtttccagatattcctgaaagcgtccatctccagaatcctttcccctcagaaactcctgaaagcttttagtgctaaatacttgtctgtgttgagtttctgatatgtttttgcattattattcatagactcccttaccagaacaggaaggcccaactgttggaacagtgggaacttttgaactgatgagctccaaagatttagcataccagatgacaatttatgattgggaactcttcaactgcgtgcatgaggtaagatgcaggatcagatgtgttagtagctgagatagcaaggataaaggctgctggcattgcttagtttgtaagtgctaatatgtgctacaatatggaaaccacatgaccatttttttgcatactgagcttataaataaagcatgctataaagcctttgagtattaaagaaaaatctttacagtatgccgtgtcttcctgtgtatattaagccagtaaaacctagtttatatttatatatttaacaaacctcatggaagcccttcaagtctgattgacttcacatttgctgaccagtaaaacactgtcttgacaaatagagaaacctgctggtgttttgatttaaaaaaaaataagcaaaattgttttcctttattttctagctggagctaatctatcacacatttggaaggcataattttaaaaagaccacagcaaacttggatttgttcctgaggagatttaatgaaattcagttttgggtcgtcactgagatctgcctttgttctcagctcagcaagcgtgttcagctattaaaaaaatttattaagatagcagcccagtaagtatatttagcttggaaagagaaaaaaaaatgttgagctgtgttttcattttgttttcttagactacaccttaaaaagaaaagcaggatctaggaactgctagagggccaaacacagggtcttaggaataaccaaactcttgtaatggatctctcctatattttgtagcatttaacatcaatagataaattaacttctttacagcactgatgctggagtcgaagttgtgacctctctttgctctttgctttctactcagacggttttgcctcctttagtttaaaattccttccgtaaaccaagttcccttatacttcgaaagttcagttgaaaagatcttgaagtcaatgtccagcatgacacattctcaccagtagagggcagtgcagcatgcatgtacagcagcacatccagcccagacagaattaaatcggtaaaatgcatgcgagctaacctggtacatgaaaatcatcactacaaacatcagaaaaagaagcatctatcttataaatattctattaaacagcacttcatgggaaacaatttttttactacaggggccagttagagttctccctgacatgaatttaatcttctcctgctatttagatatgcctgacaacctcctgtttacttccatgtttttggtatcaccacagtgctaaaaataaaatgctaaatgtggcctatggctgtgagacttctttcctttctaaatgcagggagctctagcacacaggaaggctgagagcacaagtgaccccagctagacaattttcttgacccaaaatcaaacatggagtttgatttcctgggctaaacaaagaagtaaaggctgcttgacattttatagatatcagtttgccagatgcctggaattatttgccaacaacttgagggttcaatagaataccaaatcccttggattcaaaagctgctatctgttaatatggcaaagctggctattttaagaaaggcttggtaaaatggtgcctgtgaatttctggttcagagtatagccacttccctggtagtctgcacagccttatggcaagggacaaatgccttcacatatttggaatgagctgattatggaaactatgacaagatgtgctttcccgttagaagaagcacactctctctcttcaccttagcctggcagtgcccaatgcaacaagaagagagaggcaatctgcacacaaatgtgggaagccagaaaatcttttggggcctgatcctgttattttacagaggcaacatgggagagcctttcagaacacccaggacttttttttatatatatatatttttgcttttcttatccctctcccttctgtttaggtgaatgagtaggtggacttggccttcagtataaattagtttatgttatttaaccattattaagccctgtgctacatttgccgtcctgtagagaagctatttacacagcccagctgaagaagactgtagactttttaaatccgagatctacaagaatgaggttgaaacctcgtgacagtagcatctgttttactttatatttttagagaacttcaacatatttgttttaagctctttgcctgcccagaactgtgtgaagttggtggaagcagatgttcttattcctctgtttacattcgtggaggcatagagaaatttcatgacttacatagggtaataaagttagctgataacaaggcagtgactagaaaggcaggtctacagccctgcatttgttctttcaagatcacataaaggacagaggcaaacacatagatgcgattgtatacctgcctttagccccaggtgtcttctaaataaccttcagctcctgaactcagacccattgtcccagcacaccaaaggcctcacttgctttctcaccagtgggaccatacacactagcttctctgaaatatgttctccatctccacacagacaatttaagaattactctttgctacctttgcaatgggtagcaaatgcaacaatttagtctttttcaaaaatgttaatccaaacaggatttcattatgatatggtcaatttcgataaccatattgattcaggatgaaggatttatgcgtattgcaaaatgaattctttcccttttcagggacctggtatgaagaagtttggggtttctctttctaaaaaatggttaaaccaagtacctgtgttaaacatcaccattctaataagaatttctgtttttttccacatgtctcattcccaaacatatattcataaaagctaataatggcgtaagtacagattcaaaatgatcagcttcattgatgtcagtaaaacacagagaaggttatttcttggtcagttgtttaggttacttctcagctttaaaattccttgagattgagtgcccagcctatagagatcacaccttataagttgatatttttcaacaaacaagtagcatttgcatggcaggtagaagccatggtggctgcagctgtgagactcccttagtgccctctcaagctgccagaggaggatatccaccttcaggctaaaggtctagaaatctccaagggcacttcactttttttcttaccccatgagatatttccctctcggtccaacaaggcttttagcaagtttgggattataataacaacccctaaggtaggtgtctttaagttccttctcagatcccaaacctcaatggctaacgtcttcaactttctaaaaacacagtgagaaatcaaacagcagaacatggtcacccaagtggaacttttacagtacattaaatctatcattgcctgttctcataaatgagccctgacaaatattaatgactatcagaaaatagaactctaattttttttatctcacacagaagtaacattttactcaaacacgcatctcctgtgtttcagctgtaaggagtataaaaatctgaattccttttttgccatcgtcatgggactaagtaacgttgctgtgagccgcttggcactaacgtgggaggtaagcttcagctaggatccagctgtgacttttgccttaggaataaaaacacaggctcaccagtgagctttttaatagaaatatcactcacactagtataacaatgggaaaggtgggacacttggagggaggtgacctgtctcctttttccagttgcctcagagggagaatttttaaaagatattgtccttttgtgtatggagagtgggggagatgaggagatgtctacttcttgatatatgcaatgtaaataaaaataagtccagttcctaagtataacatgaaggacccacattgctgggaatgacttcataagtttgctcatagattgtattgttttctgaaatgtctgcttgttgcttttgccataaatcttatctttaattgaaagaggacagaagatccatttttatccaagtactcattttgcttctggaaggaagagccaggaagccaactgtttgcagcagttgagtactaagtgtcgcctcaccacctggcagacttctctccacggagaggaacaacagttggctaatattcagtttggggcaaaagtgaggcaggtgtgttgtgagtctctgtagcaaatataatgaatggtttgtcgagagttgggtattcaagctagaaaacatcttcatttattattagctttgtactcaaaatgtgcttgacctcttacacgtggcatatagttgaagaaatactaatctctaatagaacatacatacagaaatagactcatgctaaaaataaaaaattgtgtgtaagtgggacacagaaagagggcaaggagtatgtattagagacccaacttgcaatggtgcttaaaggcagctgtttgcatctctaaatgcttttctgaaattattttcttccccatgtccttcttgcaatgattttctttttccgtccctcctaaatgtttccattgtttgtagggcaggtcctcacaagtccttctgtcttgggtttctcttaaaattccaggcagatgcagcacacagcagctcatcccctgaatataggaatgagggaattggtgaggcctgcgtgccatgcagctatatcatcttccagctagtaaaaggacggagctcgtgctgccaagagatctaagcacaaagccataatgcaactccctcgtcttatagtccaaggctcttgggattgctggagacctagggtcctcctgcaaagagtctgccttccccagtcagctaccagcttctaatccccctgccacagagtccaaattagttggttggggacattttaaaaaaccataaagcctcaaagggtccaaggaggccaggtgtgggtaccacagatcagccagacaataagaacagagcatgtgggaaacactctctgaaccctctttcccagtctaaataaaaaagtaggaggctgctgaagagggtgcaggcagcaaaaggagatagctaactggccagtcctttggtttcactagggatgggagttctgtgagtctatgagcttctgttttcagcactgaatgttgctgaaaagaggaaattatcctttcatcatttataagcctttgttttttaaggtgaagtataattatataattctgtatgggagatttcattcctaagcacctttgattctagtttatgtacctgcacttgccgagaaaacctcccaaaagcctcccatgcaactccattgagcaccacagtgaccacaagagcagtgtgagaaatgctgcctggcctcatggaactaggggacacgtgtggaacagccacggaataaaatagaaaggaaagccagagcacacaataaagggaagggttcaaaactgagggggaagatcaagctgagatgaagcaaatgagaattacctggagcacacacactctctcagcctcagcactggtgacatctggagcagaacagttcttggtcgtggagacgtcttctctgttgcaggacaattaggagcatccctggcctctccccaccagatgctggaagcacctcttaccatgccccaccccggctgtgacaacaaaaaaatgtctgcacacattaccaaatgcctcctggattggcaggatggccctattgaaaacactgctctagaagcatgggggggtggataaataatagtattaagaatgaaagaaacattttttattaccctgtgccctactgtctttgacctaaaagaaagctaagtaaagaaagagaacagatgacagaggtcttgccaaaaacataatccactcttatttttttaaatggactaaattcagtaagtcaatgtttttgcataacttggtgatctggatactctgtgtggggtgagatcctggcatcccttgatgcccatcccagctttcagccctttgaatagtctcccctaagtgagggcatcaagtcttcctgaaccctaacttgaaatgccagaaaaatgagtttggaggatatacagggactagtttttagaaacaaaatcggggttttacagatgtttaaatgggaatatgacaaactgagataggaaagagaaagagccaagaagagccattctgtggattgcagaggcccaattggtgaatcaactgttgaaggtaggcttcactgttcaaagcctcctcccagatgacccaggagtctctgagacccaggggttggttgatgagttcctagtcctgggatgggaaacgtatcacacagctctatcttggcttagccctgtcaggagagagaagtgaaaggttcagctttactgaagactcaggaactaagcaaagtaggaaccaataaattgaaagatgattcagtattgatctattggtgtagatatgtgggtgcagtaagtggtgttgaatcatttgccgaaataaaaacatgagaaatcagtaaattgatagaactatccaattttgtattataggaaggcatgtgggagaaataaatgctcatgtagaaaagcatggcgcatgtgagagacgagacagcaggaaaggaggcaggggatgtgaattacaggctctaatgagaagcagctgtgtgactctgggccagtcattgaaactgtgagacttaattttttccatctgtaaaacacaggctcaatctattcaaatgaatatttagggagtactatgtacccagtacttttttaggcactgagaaaaatatcagtaaacaaaacaaataaaaattcttattctcatgtagtttaccttataagggaggaggagggttgaaagagatagtttcataagctcttttattgctaatattctgtaatctaaattcctgattgtgggaatcagagagttttaaaaagtgtggggggaggtatattcagactcttctagtctagggaatgcagtcctctttatagatcgtctagttcagaaaacattataaaagcagtaacaccaaagcattcatagttacttttggttcagttaggttaaagacgtttaaaaggcaagttctctatattctggaagattattctcaaatggcaagacagattacagtctggcctgtctcagagatgtttgattaagagccaatggatatatatttcccctagaaatggtaacccatgatacatatctagatattgaatctgacatatgcgtgtggcattttcatttcattaacagaaactgccaagcaagttcaagaagttctatgcggagtttgaaagtttaatggtaagtgacagtggcttctttattctgttcactgtctacattaatccaatttctgattagctgaattgaagttctcattttggaaattttatctgtccttatatgactttaagaagtttatgatcccttttagtgctgctaaaacaagcatgtctgactaatgaatggcaccctcaggaactaacttaaagaggacttatgtcccacataaggtcaatttgtataactaagaaaagcagtgtaatagcgtcctctccatccagctcaggttggctatgggttggaagctgcattttccttggcttgccaagattatttttccccgttggctggaggtgttagacagaaaaggagtgagttgggctcgccgggagtgatgggcaggtttcagagggcaaatcgggacagggatcggctgtgcagggcagagagtgagtgagccagacacccaggaagaagacggggcttcaggaaaaggggaatcttgcagtagaggtttcatttttgctttcataggaaatatctccccttggcccctgtatgcaaatctctttttcaaacaagaaggggaaaagaaaactccaaattttttatgccataagtgaagttattttaaaacacaaatcaggccaggcgcagtggttcatacctgtaatcccagcactttgggaggccaggaaaggtggattacttgaggtcaggaattcgagaccagcctggccaacatgacgaaaccccatctctacaaaaaatacaaaaattagccagatgtggtggcctacacctgtggtcccagctactcaggaggcggagatgggaagatcgcttgagccaggaggtggcggctacagtgagtagtgactgggccactgcactccagcctgggtgacagagtgcgaccccgtctcaacacacacacacacacacacacacacacacacacacaaatacaaatcaatttgtttaactaagtctacctttcttttgtagctatatttgattcagaaatacagttgagccttgaataactcaggggttggggcactaacacctccacccccatgcagtagaaatattgagtataactttttattattattattattttgagtctgggtctcactctgtcaccaaggctggagtgcagtggtgcaatcatgactcattgcagccttgacctcttgggctcaagcaatcccccgacctcagccttccaaatagcctcccaaataattttttattttttaaaaaacaggggtctcggccaggcacggtggctcacacctataatcccagcactttgggaggccgaggcgggcagatcacgaggtcaggagatcaagaccattctggctaacatggtgaaaccccgtctctactaaaaaaatacaaaaaaattagccaggcctggtggcaagcacctgtagtcccagctactcgggaggctgaggcaggagaatggcgtgaactcgggaggcagagcttgcagtgagcggagatcgcgccactgcactccagcctgggtgacagagtgagactctgtctccaaaaaaaaaaaaaaaaagggatctcacttggggtctcactattttacccaagctggtcatgaactcctaggctcaagcgatactcctgccttggcctccaaaagtgctgggattataggcatgagccaatcatgcccagcccaagcataacttttgactttccccaaatttaaccactaatagcctactgttgactagaggccttactgataacataaagtcaactaacacatattttgtatgttatatgtattattatgtactatattcttacaataatgtaagttagagaaaaaatgataagacaattataaggaagagaaaatgtactgactgttcattaaagggaagtgtatcatcataaaggtcttcatccttgtcctcttcttgttgagtaggctcaggaggaggagaaggggttgttggtcttacagtgtcagggatggcagaggcagaagaaaagccatgtataagtgacccacacaattcaaacctgtgttgttcaaaggtcaactgtacctgattgtggggtgaaaggcaggtgtattaggaggtaacaaagggtggtgtatctgtcaccagtcattaccatcatctctttttctctcctaaggacccttcaaggaaccacagggcctacaggctgacagtagctaagctggaacctcctctcatccccttcatgcctttgctcattaaaggtaatcctaataagatgcacaggccaagcaggtgatgagtatttggggagggaaatgaacaataccttgataagattgattacttagggaagaatgatcgatcccatccttctgccttctttgtcatctcctctcagtcctgactgttcagaaagggtcagaaagatgactggaggagcagagatccatgatttggaaaacttgttagtgaaacagaagattagtttaaaaattttactactctcaggtgaagtgatttaaaaagttaaacacctagcattaaaggaactattaacagcttttttcaactgtagtgttatgcaaatctgccagcataatctaatggtgctattgtgctttcttagtatgacatatttccattagtgattagaatgtggcttttatttctttacagatatgacatttactcatgaggggaacaagacgttcattgacaatctagtaaactttgaaaaaatggtatgtgcagtattataaccttaaccacaatgtgtttttaaaataaaatttgcattttttctaataaaggaaataatttccatatatgctgccctgctaaaaaggtagttacacataaaggagttttgaaatatttggttcaaattggctacctattctattctgtcagttctcttttgtgaaattgaatagtatttgtgtggtggttcacagcagcagctggcttttatgccgtgtgtttcttccttggcagcctgttgctgaaatgcacaaatgttcctgagtgacttccatgttgttgttttgctataacgtttgtggagctagactgccccaggatgcctttgaaaggtttatctgccaagcctgacttcagtgcccgtaggtaaaaggcaattctacgcctttattatagaggactaatctaaatgtgtactgcttaccccaataaagttcgctcaagttcagagaaggaacatgaaaacctttataataaaaagtttttaatcttgtttttaacatttttatatatttacttattgttggagacagggtctctcattgtcaccctggctaaagtgcagtgttgtgatcatagcctcactatagcctcaaactcctgggctcaagcgctcttcctgcctcagcctccctaggtgctgggattacaggcatcagccactgcgcctggcctagaaaatttttttcacaacagatgtggaactggcacatattcagtattttctagccaccctcctcctagtccttactcctagcgggggggaaagcaaggttatctggcttaagttactttgcagtttattttcttatcttctgtgaaacaataaagcagagcatgccaaaacctttctttagctgcatagtgcatgctgatggaatgatcattgtcttctgaatcctttggctgcaacctggtggatggagtgttggagtgcttaatatctctgtgggtgagcatttgcccggtcatgaattgcagtgtgaatgtggcgccgtgagaaaagccggggacctggagtctgggagacatgaggttcagtacacagtttcatcactttatacttgtcccttaacttctctgtgagtcggtttccccaacagaaaatgggaatcatgcccagcccatctatctctggattatgtaagccataaagtgctatagacttcttatcagaaaactgttattctagttgtttcttgaaatcaagctggcacgtgtgactccaggagaatctgaaacaccctgcagtcagcctgtaaggatctgcagcattcagcccggggaatgcgcttattgcaaagcccagtctggtcaagtgcagctattgctgggcactatgtcttaagcttcttaggaagtaacacgagtacacactcctcaaagactctttgtactagatggcaagtatgtcctcagcagtcttccttcccacccctcacaccaaaggcagggtatgaacatcttactcctgtgtcaatttaataattgtttgatcaaagtagacaacattctttgctaacttattagtatggataattaaacaattcctctgacttcccagaaagaaaacctgttttccagaaatgaaagatttggcaaatgcgtaaagaaacttctggattacttatgcagaaatgcaaactgaggattggctaagccacccatttaattataaaatatacatgtgcacagagatgtagaagtcagggtttcctaaagagtttactgagctttagaagttttgatggctatcattctcagcaaacagaggaacagaaaaccaaacaccacatgttctcactcataagtgggagttgaacaatgagaacacatggacacagggaggggaacatcacacaccagggcctgtcggaggttggggagcaaggggagggagagcattaggacaaatacctagtgcatgcagggcttaaaacctagacgggttgataggtgcagcaaaccagaatggcacatgtatacctacgtaacaaacctgcacattctgcacatgtatcctggaacataaaataaaataaaataaaataaatttttaaaaataagttttgatggccaaagttaactaaattgaacaaataagaacagcaaggtatgcaaagccagccatctgttggggtagataaaagttgtttcatctgagttttgagatcttggtgtcccatccgtaacctgcaaggaaaagtcaaggtcacattcagtggatactaggagagtgccattcctctccccatttctgcacttcatacccagagcagtggattcctccatgcctagcactaaggaaagagatccttcccatcttgctctcacagagtccacttttgctgaaaagcaatgaatagctacgatagccagcagttcagcttcattaatggaaacctaaattaatgatggcataagcaagatcagcttatttctttctcacttaaaagttcaagcaggccaggtgtggtggctcacgcctgtaatcccagcactttgggaggccgaggcgggtggatcacgaggtcaggagatcgagaccatcctgacgaacacagtgaaaccccgtctctactaaaaatacaaaaaaaaaaaaaattagccgggtgtggtggcgggcacctgtagtcccagctactcgggaagctgaggcaggagaatggcatgaacccagggggcggagcttacagtgagccgagattgcaccactgcgctccagcctgggagacagcgagactctgtctcaaaaaaaaaaaaaaagttcaagcaggtatggtagacctgctacaggatgcgatcagggccccaggcttctctcttgccagttttacatccacttggttcaagatggcaacctccacctccacactccaaccacagggaaagggaaaggagaaggtgaaggcatgcttcatcccttttaaagatagggaagaagttacactcaccacttgcctcatattttgttgctcagaaacctagtcccatgaaaggaaggctaaaacatgaagcccttatttgaagtattcatatatcccactgaaagttaaggggttttattcatatgaaagagaagggaagaaaggatatcaaaagagtactgtaagttctctgttccagccacatgatacattttatctcatgtgagaaattctaccataagaaagtttgattttagaattggccctccagctgggtgtggtggctcatgtctgtaatcccagcactttgggaggctgaggtgggcagatcgcctgaggtcaggagttcaaggccagcctggccaacatggtgaaactccatctctctaaaaatacaaaaattagccaggttgatggcgggcaccagtaatcccagctacttgggaggctgaggtaggagaatcgcttgaacctgggaggcagagattgcagtgagccgagatcacaccactgcactccagcctggatgacaagagcaagactccatctcaaaaaaaaaaaaaaagaattgtccttccacaagttagatgttaccagaaaatgaaatgaaatttcaaaatgatttgattatgttttctaagcaaggtgcatgttgccaggtttccaaaattttctccccataaactaacccacccctacccccatatcaccaccactaccatcagtggctgctgttgttactgtgggtcttgggaaaggctacattttccttttcaggttgatgtcaatgccacttcccagtcatccatcgtcaaggcccaggtgctgagcagagctggcagcctctgtggggctggtgggctgggtccccagaaggagcccctgccaggggccgaggtcaccagggtagccaggaatacagataccttttcttggtggcagcattgtagagtcacagcaaaccaccatgccaactctaagtgtttttattttgtacatcttcattcaaaacatttctctgaaatagaaccaatctcctacatcttcacccttgaggtatgaaataaggattagagaatttgttgcttattggttttcaggatttatgggtatgaacaaaagagaattcacaccctaatcctgatgccaaaaaaagcagacattcttttatttggggggaacataaaggaatattcaaaaaaatgtttgaataaagtccttcctagttctatggcatacatgaatatttataacatttaggaggtagactagcatggattagaggataatatgctggccacctgccactatcccaggctgcataaagcatgctgataagagattggttctatttcagacatacccatatttaggtatatttatttataaatatgatttttaaggtagtcattttatttggaatgagaagcatagggcaaacttttatacttctgtaaacattacagaagctaattcattaaggaagagaaatgttttgaatccttttatttttgtatcactaagcatgtcattacataattagcaacaatatgttttctatcaccaataatattattataagattcatggagagagcacttcacttgttacctcaatctatggaaaaaaagaatctctaagtaaaaatctacgtgttcaagtccaccctattcccagagctctccaacacaaaagaaatctatgggagtactttgagagtttacatctttgtatagatttcccaggccaggctaaatgcagatttccaaacggtatgcttcaaaacaacataatgtgtggagtgtccaggcaaaagaatttactaagaaatataaacatctagaaagtaaccctgggcctttagattacctgcagttgggaagagaaaacataaacacatgaaatattaaaaatccacataagatataaaaactaggtcacaatagtaataaaagatgtcagaaagcaaaatgcaggaaagaaaacttcatgcagttttatcaatggaaaataaaaccacattatatgcagtgacataatatcagaagatctagactagccctaagcacctgtccagcctcatctgacactttgtcttctctgtatccagtccaagttggtgagactgacctgccttcttctccttttggcctcagggttttttgtactagctgttacctttgcctgaaattgtcttcccccagttgtctgctgtctggttcctcgtcagtcaggcctcagctcacaggtcccctcctccaaaatagtcttccctaaccacccttgtgggaagggaagaagatcacacatcttccctgatctcccctcctccctgtggtgctaactgtgcctgacctccgtgtaacaccgttctgcgacacccagcactctccaacacaaccttgccttgataggggtttcacagcctgggattatcttcctgcctcttcaatgtcttccctaccagaatgtaagtgccctggcccaggtatctgttttgttcactgatatttctccagcaccataaaaatatctgacgcattatttccccagcacccataaaaatgtctggcacatcgtaagtatgcaagaagtacttgttgaataaaatgtaatgtttcagtgttgggcttagtgcacgaaagcatttttcaaatattttatgtaataaatccaaaagtgtcttctattttattagaaaattggatgaatcaactgggcacagtggctcacgcctgtaatcccagcactttgggagactgaggcgggtggatcatggggtcaggagttcaagaccagcctggtaaaaccccatctctactaaaaatacaaaaattagccaggcatggtggcgggcgcctgtaatcccagctattcaggaggctgaggcaggagaattgcttgaacccaggtggcagaggttgcagtgagccgagatcgtgccactgcactccaacctgggcaatagagtaagactccaaatcaaaaaaaaaaagggaaagaaaattggattaaccaaaatgtcccaaagcattttgcataactgagacattataaaagatgactttcccttagcctctgttcctaaccagacattattctgtcccccctcctccctgtggtgctgtgtctgtcctccagtgtccctccctgagtacatagaggtatacatgctctacacgtgcctggaaaggcacctgaactgtcttctcccatggtcatcatatataccacataccgtaagcatcatgcatgtgttacacatgcgtatctgcatgtcatacacctcttggatactaaagatctgtagggagaccggactcagggctcctcctcaatgatgcacacagtgaaggctagttcagcttcaattcccttttatctctggtcctcactgtgcctggccatttggttgctatcacaggcacaatctttgttaggtgagacactgtgtatttctggatcttgtgaaaaaaaaaattcttgtcccaaatatgtggaggtctgagtgaaataatcaaatggtgtaaatgtggttttacacatgctaagcaaggagtaattaacaaaggtcctatatttgataggcataggtctggagacagaatcaaatcggtagaggcagaaatgtaagaaaaagcaatctggcaaacattaagagcaaggatggtacagatcttaaggggcaacagaaggaagatcaaaactgttgagggcaggcatttagaagaggcctgacggtgaggagccgcttcctgagggatctgagcagaggcagaataataggctaagaggaaggctattgtggccgctgtctgggagcgggaggtcctagagtggtaccaatgaggtggcgtggcctggagggcctgccggtcagaacttgaagaatgaagtcttctcttccgcagtgggagagcaaagggggaacttggactagggcacaagagtcagtgcaagctggctaggaaggtgggggcagccacaaagtcctggtaggctatgtcatgtctttataggagtgaaagtggaacttggctggcctgctcctgaggggaggacaccacagaagggtgacgcctgccaagagccaggccgcaaaggcccagtctgagaacaaggtacctctgacacctcagcggactcaagggaaattccctgcatcagagcttgagggaaatttgtgtttgggatgccggcctcagagcctctggcttgtgccaggccgaggtgcagacagtggtcaccccttcctctggatgctgtctttgtactggtcactctgatgcaggctgacccctaaattggggctcagctggagagagttcttggctttcctaaggaaggaatttaagagcgagctgacaatgaaagacagcaagttcatgagaggaacagtatacaggaaaacaagtgctctgtagaccgagcagcgctgtcttataggcagggtagcacagagtagcactcacagagtgctggccggctctatttatacctactctagttacatgctaactaaggagcgggtttttcacaaactttctggaaaaggggccaggagttcctggaaccatctaaggtagcttcccggtcattgccgtggcatttgtaaactgtcatggcgccggggggcgggagggggggtgagtattgtcttatgcaaatgcattataattcctagtcctagctggtttgggctggtttctttgctacatcagcagggtggtgaccaaggctgggaaaacaaatcctgctgatcttctacctccactctgcaacgcaggccccaggaaggacatctacttctgtgcccctctgttttcagctctaaagaaaaatagacgcgtgacatagtcacagagttcttcactcaccacatcatttttcctttctgcacttccctcctcgagtgcatgtcctgaggggaattcatcagctttcagttgggcccatctctaagccctgtaggccacgaactgtaggaacatattcatttttgcacataagctccgaagacctgtacttaggattagtcccaagaaacatcagtttaagcgtggcgacaggggggttcaatttgttcccctacacggatccggagcgccttctaaaggaggcgctctaatgtggggcatgtttgccccacatttactcctgaattaccagttgctgtcttaatgagctatttgctcaagggaatgtgtcataaacctcaggctggctactggggaaaaaaagatgagaatctgtgctttggagtaatcagacactcccccactccggcctggcgttatagaaagttgcctggccagctccaggcaggccaacctgctctggcaggaccatgaagcgtagggtgtaatttttggtttcacccctgctgcagcagttggataatgaaccctatatctctttaacctttgtttctgccaggctagactgcgagcaccaatgaataaacagctgtctaccgtcaaaaataacataggctgaagtttgtggaaagatagactctaactagatggttttagtttttaaaatcctccactctggtccaagaaatcaactgtacgtgcacagagcagaaagctgcatccacagcagctcagcaaaggaggctgagaggtttaattcatgaatacttcaacagatgtcagtggcatgacttctttttaactgtaggcccagtatagcatcatctagatcaaggaaagaagaaagatcataatttctctgcactttacaatttgtttagtctagggcaccatactagagacggtttggaagagaaccaaaactgtcttatgaagaattgttgaagaaattgagaatatttaggctgaacaagaaaagatctgggggtgtgaagatatccataacagttatatccaagtatttgaagacttgtcctgttaaaaagaaattaaacatgtttgctgttgggtcattgccgtggcatttgtaaactgtcatggtgcccgtgggagtcttatgcaaatgcattatgagctccaaggataaatgagcgaaaagtaaaaggagaaagactttaactcaaaatgataagttttaataatcagagatgtctaacaatgaaacaggctatttttggaggtaatgagttactcattgctggatgcattcaaacagtgggagagccactgtttataggcaggctgtagaaaaagcattatgcactctggagatggttcaaggaggtgactcctgaagtctctttcagcaactcaggagagtgccttgtagttgggtgtagttgtcagtaactgcttaatattacatgtgttaatgggtgcaaaaggaggtgaagttaaaatattaagttaacccttctttggccttgtgaaagcatttgtaactatgcattgaccgggaatgctagttagattcacacatcatcactgtgggttcacaccattaaacattattgtccggacctcacaaaggaaaagaatggacctcgctgtgaagccagatttggatttcgaagttaaactgaagttatctttgagaacaattaaaaaggatacgtcaaaattaaaaccattgttaaaattaatcaaagatttagaaaggtagaatgaacttcagggctggaaattactgatttaaacaattgttctcacattttaaactacatgagctaaaaattatgaagtctcagagtatagctttaaagagtagcataaaaccaaagtcagaatgaaatgttttagctttcaaaactaaaaagcagaacaattactccctacaaaatggtataggaagaggtttctgacccctgctaattgttttattattcttcagaggggcatactggcagcatttcccagggttttcggtaattacactccattcaatatctgaagaattacaataattctacatggaatatacttgtgcccttcagatgcaaagcctttagagaagtgaaaaaacaacttaaaagtaaattagcagggaagttatcatagttactatttatttcacggctccatatatcaagggctaattatacattgtacgttacattttctgggagggatttgtgatatgtttctcatgctgatcaacagatggatgtgtcagttttcacgatctttgatgaagtgaagttctaacttttccaattgcctctttgtgtgcgaaattatccaatgcaggtacatgtcacttcaggcttgctagagtcctcaaagcagtagtattcagtgaggtattatgatgcttgcagataatatatttgtaaggccttgactcatctatgatttttttttacactatgtaagctttctcaaagtcattttcttatactttggcaagccaagggtccgtgagagaagaaagggttgactagaattacatagctgctcagagatcggggagtctctttccctgggtggagccttatcaattttctgctagtgttgtaattaatctattatctccacaggaccccctttagagcctgagcagtaaagtgtcctgaaacatacatagtgaccaggagtgccagctattgttcaaataccgtgacattctggctaagaaatggagcgtaggtctcatcagtgtttttccccaggggataggagtctctgtttctgtccattttcttttctcttttcttttgtttttaattgagctcagcacaaaagattcccttttaagtctttattgcaaccaaaactttacaaagaagttaagatgatcacttagtgaccaaattttaaaaggtcaaatcaattataatctgtccatttggttgaatacatgctttttaaaaaatgttttaaaatgcaaatggcatggaaaatagtcacaatgcaatgtgaaaaatttcaaatcaaaataaaatatgtatgtactatatgaattcaaatcttttaaaaacatgtttttatatatttttaaatataagaaggctatatgccgaaatattaacaagattactctgtgaagtaatattctaagtgatttttactttgctcttaacattttctgtattttctgaatttctttttttttttttcttgagacggagtctcactctgtcgcccaggctggagtgcagtggcgcgatctcggctcactgcaagctccacctcccaggttcacgccattctcctgcctcagcctcccaagtagctgggactacaggcgcctgccaccacgcccggctaattttttgtatttttagtagagagggggtttcaccgtgttagccaggatggtctcgatctcctgacctcgtgatccacccgcctcggcctcccaaagtgctgggattacaggcgtgagccactgcacctggcctgttttctgaatttctaagatgtgtatatgttagtgttataatcagaaaggaggaagaagggagggaaggagggaatcaaatcatcaggattaacattaaaatgcaaacttttgctggaagattagagaggtcagtaatacagagtgtgtagcaaaaatgtgaaggtagaatattttgacttgctgttcagccaataaaatctcatacctcattagtgagtcttatttactgtgaggaacttgataagctaacccttctccacatctaggatagttacagattctcttacaaattcatggcaacctcaagaaaggatggtgaaaaagcactaatgtacagtctcaggcatgatagatgttttttacatcatggggaatatgccaacaattatgagagttatgccattaatattccttacctgaaaatgccttgtatgtatgtgggtacccctttgaaataattaaacaagttatacatcagctagttgccttcagatagtcaacatctcagaacatgtcacttctcatggtaccaagtattgcagaaatggtttgttttcctttttggattgtactctacgcttacttgaatttctatctttcttttttctatattccttttagcgcatgattgcaaatacggccagaacagtgagatactacaggagccaacccttcagtaagttaagtgctgccacctcttacaatgtagatgttggtgattaaggtcttcttaatgaggccattgagacacccttggagcctgggaaatatctgactgtgtcagagacactttggaccatgaattccatgagataggggccttgagtttaaagattttttttgctgttttaaactagaacatatttacattgttgtgaaactagaaaatcaccataggaatattattttgtgaatgaatttaaagagatttaatttgctctatccagtgcagctggagacaactaaagtacgactgccaacaaatcctgcctcaaaccaactctctttatgactcattgctccatgttgagaaactcacatcagcccttgatgactcagttcagtcaattataaaccaggaaagataatatttattgtctttcagggtgttgcaagaatgcattaatgtttatagcacattcgtaaaaggtccaaaaacaggatttcatattatatttctagtattcccacatgaatttgaggtgctcttttaaaatctgaacatctatcacaagaactggtataatactttaatataaaaaaattactaataataaataacaattttagtctgttgggagttaagttgcatcatagcaccagatggtcatactagaccagtgctactgtttcttctgggctgggactttggtggtgggggtggagctttggctccctcaatctggtctggaaatgagaaggtgaacactaaaggtttttgctaagctcattgtatgactcacttgaagaaatttatctcattaactcaatatgatactatgacatagacatgaatctgaggctaccagtaccgtctcctccaataaaccgagtgctaagagactatgatgttcttgttttattagtcagagttgtttgttcttcctagagcaggactggctcatggccagatttgctaacatgggacaccagaactactaaatgttcattttttaatgaatagggaggaaaaatataagaaaaatgacattgatttggggagcaactgattcaaatgactgtgccttctctgacttccaaaatgtgaatagtcttgcaatatcatcaactattcttatgtggattcagccagaattaaagtgtctcatgtgttttcatctattaatttacgttgtgtttaaagatgtgatcataaagcagttgtacaagtggaaacaagaatagataagtgacaccagttacaaccggagtttataatcccaaatccagcagcggggataaaaggggaccctgaaattatatgccaaatcgtgtgtgcctgagggggtttatagccttaagaaggttttcagtgaggctcaagaaccataaaataatatgctttgttttatgagcttctttggaagtaaatcttgcattcttctatgtcacctcctagagaagccaaggggaaaatgtatttaaaaagaaaaaactccactgcatttgttgaagttatcagtaactgctggtaaacaacagctgctcagctctgaagtcaacaatctatagataaagctataggaatagattcacaaacactgtgggaatgtgtacaatgtaattacagtatattgtacgtgtagagtacactgccagtgagaagcagaggaaattaaacacaatgtgctctgcagttcgctgtggtattatttctatgtgataattatactgatgagtttcttctcacagggggcaggggcatgtatgtcttctctctgcttttctgccttcagacctgcaacactccccttcaccccttgtgcagatggcattctaattgtctttgggagtgctgtgtggatctagcaggagcaaccagactgcagaaggcagtgtactgtggtggaaaccccggtcaggagccagggtctggctctgccactccgggtgtccccttagaccagaggccctacccagtgatgcttgaaatggaggtggcccacagaggtgttgggtctaaagagagcatttttttcccttttattttgaaataatgtcaccattttaaaattgggagaattcacgaagaagaaatccagatttcccatttcttaacaaaaaaaaaaaaaaaaaaggaagatctggcaactctaggcacagattccccgtggcagcaacatgcagaagccaggtcatcacttccagagggacctgtgtttccagttcaccaccttctggtctggctttccttattcatgtatgttccctgcgagggctgagtgcattggctcatcattcagccctgatcttcattaaattggttaacctcagttgctcacatgcttgggatgtgcatcagaatagaatggtagctgagttttcagagcagatagcattaaagaatcaaacgtctagcagaagtcataacttcagcctgtgagttgggttttttctgaatatggacagtctctaagaacatacagtcggtatagtaatgctgtatactgtgtgcaagtaaagaggggagtcaggactctgtagtctcactggcttgcttcagtttggcccagatgttaagcgcttttgtgaggggctaataaaaactgtcttttgacattagtcttcatctggatcaaaggaggcagagacacagagtgtgagacacagagacctctggaaagggaaacaattttaatctatacccaggggctatcagacacatgcttcccttttaatttggtgccattttttttttacaacgtgcaattcaaaggagaatgatcaaaagaggtgattccagggaagaaaagaaaattggagggtaggaaggaggagatggaacaaccaagtggaaacgtttcaatgattgtggtgtgttgaaaggtcttgagggaacccaggaacctatgataaatgtaataaataattggagaagtaagattgtatcttatatacatatattacacaatgccaattctgccctttcctctttcaacagatcctgatgcagctcaagctaataagaaccatcaggatgtccggagttatgtacggcaattaaatgtgattgacaaccagagaactttatcacagatgtcacacagattagagcctcgtcgaccatagacatttcaaatgcccaaagcaacagtttgtctccagtccacaatctttcaaaaatgccatttatgctactactgactgtattgccactagagaattctacaaaacaagcaaaaacacatcctgagacacctcagggctgcattcagcttaccagctacctagcaagagaaggaattatttgacatgcctaaagcttacacactctagcttaggaatccccagtttgtggctaccctgtttcatttccacttgtgccatcttctttgctgaagtgttgaataaggcccacgtgaagagtttggtagaaatagccttgtcaagagaactagcaagcccctgacatttttttctaagagtgtttatgggatgagatgtgctacaaatgggatagatttggataaaattttaactcaacatcttgatttggagcctggggtttcgggaaggtgttgaggaatctatagaagtccaaattataggttgtattcttccatcttcattgtcttacctctgaaggaatagaacctgaccacattattatgaaacattatggctgtttatgtaatttagggaggactggtctgtaatttctgaatgtatatagaataatatttatgtttacaatgtaacttttcaaaatttacaaatcaggattatatacataagaattccactaagaaatgccaagattcttaaatttgccagcgttaaagtagaaaataacatttcagaagagcacaatatgcataaaacatttttcaaaattgaaatattttcctgggcattaaaaacctttactattggctacaaatttattgtacctgatgaaaacatattttctggacttaaatgttattacaaatatcttaattttcagtaattgttttgcactttcaaagattgtaaatagttcattcaatcaatggtatggagttatttatttgctacataatagatactgtgccaaataattactttttatttattttatttagtacgtaattttgaagtacattttttcctgttttcacaattagactacatttaatgtgtaggaattgtatgtatgtatatcttctgtaaataacatctagtatcttcactaaatataattgtcgacaagaaatggttgtgttcatctcaattcctataatatgaaaggggtaaccatttggtatggtggggtgttggatcttttaatgacacaaaatacacatattataaaattcattcttttaaagtgcagaatccagtgatttttagtatatttacaaagttgtatagataaccatcatcactatctaacttcagaacattctcctcatccctaaaagaaactctgaactcattagcagtcacttcttcttctcctctccctccaacctctggcaaccacgaatctgctttctttgtcttcagatttactctggatgtttcatatgagtggaatcatacagtatgaggccttttgcgtctggtttctttcacttagcataatgttttcaaggttgaccatattatagcttgtaccagtacttcatttatttttatggccatgtaatattccattctataaatagactacattttgtttatccatttatcagttgacagacatttgtctgttgtgttcacttttcggcaattaggagcattgctgctctgaaggggcactggattttagagctcccttgtgtggggcctcatgccatttctcagtgatttaagtacttagcaaatatttgatgaagagatatccaaaattctttaaattccagacatgcctctattttttttaataagtcagcattttccagagtgtgttccagcctattctagtctcacaagttcacatattgtccctccaaaaacaaacacacacatacaaagccaaaaacaaaaccaagattctatcttcaaataaatgtggggaccactgcataatataccccattcatagaaatgattcccagtattcactcacactgaaggctctgagaagtcctattgtaatcccttttaacatcccacaattaaagtccactttcagaaatgccaaagcaggcaaatgcctctctgtgttcattcatataaaatttcagggtccccagaaccagaggcggtgttttctgcggtattacacctgcctctggaggcaagtgcagtgtctgggatttactagacaataaaagaaggtcactgaataaattttcttgaaatcattatcgttcagtatttcactatctgatagacctcaatgtcagctgcaaaggttccacttttatatattttcctttagatatcctttatagtttcttttctagataatttacaaagatgatgaacgaagctgggagcccgttcctggggcatccttgctcttgttttgcttgtctttattcctactttactgaaagctagcattctatatacagcagcacttctccccaattccatggtgaatgccaacttacgatcttattttaatatagtttcaacattattcaaaattaatacatattccccatgtatgttccccttgttcttccacatgagaataacttactgtacttaataaagataagacatttttaagtatttctagcttctttgaaaatgcatcaa

SEQ ID NO: 501 - DNA, 153901 bp, Homo sapiens
  source 1..153901: mol_type = genomic DNA
gggtcccgcccaccacacagattcaatcacctcccaccgggtcccgcccacaacacagattcaatcacctcccaccacacagattcaatcacctcccaccacacagattcaatcacctcccaccacacagattcaatcacctcccaccgggtcccgcccaccacacagattcaatcacctcccaccgggtcccgcccacaacacagattcaatcacctcccaccacatagattcaatcacctcccaccacacagattcaatcacctcccactgggtcccacccaccacacatgggaattatgggagctgcaactgaagatgaggtttgggtggggacacagccaaaccatatcagtggagacgcgcaggggcttccggcccccatacactcccacctcccactgccctgtaggactctcctggctgttccagaaggggcttccattctccacgttccctggggcctcgtcctccttgcccttctacttcctcttggaggggctgaccttggccctcctgggctgaccccagcacagctgtgcccagagtgtgaacggagccccctggctcccgacactgcctgaggccctgccgggaagtgtggctccaggaggacgggctggcctcccggggaggatgcccccacctgcaagggtttgtccaccacccatagccactcctggactggggcagaccccacacctcagcatggactaaggaggccggccaggctgaaccaagcctcacccttccctgggagaaaggcctgggttggtgtccccaaagccacacctcctcatttttctcataccagagctgactcacaatagaattaccaaaaaagaggaattcaaatggagcaaggaaaggaataaagaaatgaggcaacgtatcatggagtcttcacccagagccccccttaaccctctcctgcctggagggacagcagccacctgcctagaggcgcagtccgttctcttctcccagggcctccaagtggcctccccctctgcattcctggagatggcagcacgtggtggtctgtctgcccagcactccttgagtggacacacctttcctgaggttatcacagggccggactctcacctgaggcaccacaggtgaatgccactgtcagagcagcgctgcccatcaccaaagatgtcaactgtcaccagtgatgtcacctgtcatcagggcggtgccacctgtcagagcagcgctgcccgtcatgaggcgtcaactgtcaccagcgatgtcacctgtcacctgtcagagcagcgctgcctgtcaccagagatgtcacttggcatcagcaatgtgacctgtcatcagggcagtgccacctgtcagagcagcatcacccatcaccagggacgtcacttggcatcagcaatgtcatcctgctccccaggtgccaccctcctccctgtaccccccacccctaatgcccacatgtgcaattcccagtgggtaccactggaaaaccaaggcagtcctcagaaagaataaaacatctgttttaattggccagtaaaatacattgcaaatcattagtattttataaacagaaacattaagttataaatccatgttaaaaattgcagctcagtgcagccccaacagctgtgtgtccaaaagtctatttttacaacattttcctccagtatttttgtgacaagaaagttcctatctgccatctagatcaagagcctgaactacagtattttcaaacaagaaccgggagaagtcggtacaaggatacgtcgtgctgtgtatttaaacggcgcttcccacacacctgccgtctgcatcccgggaggacgccctttgggaaaggcctcctcggcagtgtgaggtctggaggggtctgcctggaccccatttttaggatgctcccctccccaataaaacagcagcccccgcccctgccctgcacagcatctgggggttcataacacaggtgcaatactgaccatgggccctggagggacgtctgcaccccgaagcccctgtacctcaaactcagagtttcttcccttctttgattttctggaggacctgcagctggccttcctgagacaggctccattcctgttccatttgccttcccggcagccttccctttagtgggtataggttttgacgttctgagttactttgtatcaaagagctaattaaaaatggtccttcaaaaacataaagaaaaacagcttgaaaaatgtacatttctatttttaaaatcttcaaacttccacggggggtggcaaatgttaattctgattttaaaccccattcaacagcaaaacgatgtgggcttcaactgtgggctccgcagacgcctggagaagctggagcccacacctttccctccaagggactctgtggacagaacccgtatcccccaagcaccaaggacatcctcagactgggacttctgtgtaattctgcacctcccagccataaaactgacccctcagccaggaatcaaacgaacctcgaaagtggaacagggaggccgcctcccatggctgcctggatggcaggcacagtgggagagtaatgctctgaacctcccaatgtgatgaagccgaaagccgaggcggggccagcaggcctcccgggcacagagccacagagcccagcgtcacacgcaccgtgcacgcaagacagacgtgcacgagactgacgcacacacggccggaggtgcatgtcacagtcgactagacgggccgtggctccctgaggctggctgtggtgtggctagggcacagcccacacttcctgatccttcagctgatccccagatccccacaaacaaggagcaaaaagcacagaatcaaatgacgacacgttccacagggccaggtgggctttctgcggagggcgtggcggtggtggcagcggttctgggagagggaaaccccagcgccacttgtctatgggccgggacggcgtgcatctcactttgccggctctgcgctcttccttctcttctccctcccaaaggctgcggctttgcatgggcagcttgctggcgccactgggcgcgtcccgcagactttaaatggaatgagtggaggtctcggactgctgccggatgtagttctggaagctcttgtctccgatggggtgctccctgaaaagggggatgggagagggaatgaggcacagaccccgttgcctggtgctcacccgtggctgcgggagcttttcctgttcctaaatgtgacacactcacactgcaatccacacaaaaaatagaggagccaaaggaaccacagtgcccccggaagcacccacggtgactctgatgtgtgtgcacaggtgggtcaggcgtgcaagtacatgtgcacgtgtgctctccctgtggcacgtgtgtagcgcatatacatgtgcagatgtggaatatgtagagtgtatggcacgtgtgcagaatgtgcacatctgcactgcaaagagtgtgctcatgtgtggggagcatgagctccagggacacagatctgtcccagtgctgggacactcagcaggcgtgggcacctcctccccacatgcacacctccctcataccatgtgtgtgcacctcctgccatgtgtgtccactacctccatgtgtgtgcacctcctcctacgtgcctaccacctccatgtgtgcatctcctcccacgtgtgtgcacctccttccacgtgtacctcctcccatgtgtgtgcacccctccgtgtgtacacctcccacgtgtgcacctgtgtgtgcacctctgtgtgcctcctgtgtgcacctcctcccatgtgtgtgcaccacctcccacgtgtgtgcacccctctcgcatgtgtgcacctcctctgtgtgtacctcctgccacgtgtgtgcacacctcctcccacgtgtgtgcacctcctcccacgtgtgtgcaccacctcctcccatgtgtgtgcacctcctgctgtgtgcgcctcctccatgtgtgccttctcccacatgtgcgcacctcctcccacgtgtgcaccttctgccatgtatgtgcacctcctccgtctgtgccttctcccacatgtgtgcacctcctgccatgtgtgtgcgcctcctccgtgtgtgtgcctcctcccacgtgtgcaccacctcctcccacgtgttcacctcctccgtgtgtgcacctcctgccatgtgtgtgcacctccacccatgtgtgtgcacctcctgccatgtgtgtgcatcttgtaccatgtgtgcctcgtgtgcgccttctactacaacaaacagcatcatgcttcgcgcattttcaacctgctggcttttggccatgaggttgatggacctgctgatatcaacgaggcaacatatttggaaggcaaatggggctgtctccccagaagggtgtcgagagggatctgatatgatgatgtcagaggtgaagtcacagcactcaggaggtgttgcaggctcagtcccctgagcaactcggtccaagtccgggccacagggacctgtcactctcctggagcctcaccactgcccttcccagaccagacccgcatggtggaaggaaggaggggttaagaaggaaggaagggaaggagggagaagaagggtggaggaggagagagggaggatcgaagggagggaggaccaaagagaggagtgagcaggaggatggaagtgaggaggaggctgtacagctacacagggctctagggcttacccgcccctgaatgagcccgtgtgggggcttctgccatggtggacctgggtacccactggatggagagagtgacacagacacatctgctcactccaggctaagagccagcctagcactttacatagtttaagtcaatcttccagcaactcatgagggtcttacaaccctctgttccatggagtgagggggagtggagcttagctaagcgccacctagcctgcagctggtgactaagctgaacgtactcaacctcgccacacctgcctcatgagacaagagtgggtttcgtccagagctggccctgctcccgggcaccatgggtggcctggagagatgccagagggtgtgccactgaaccaaggcagaacaagacctgggcctagagactgccagagcacgtgacaccagtatagcagagaggctgggaggaagcaggtcagggaggcagcccggacgctggctgggggcctggagagcaaaggcagcacctgctctgaaggagggaccagcagcgccgggccacgtccactgactaccgccaggtgccagcccggtgcaagtgggactctcctcccaggcggacacctgagcacgggcggccccacccgggagctccctgcagccccacccccactgcaatctcccgcccactacactggccgtccagggcaggcacgggagtggcactcactggcttccatatttcgtcttcttgaacttgtccctcttatactgggcgtgctcctgctccaaagccccaaccccagcgatgacttgctttagcgtcttgtaggtctcctgggggtcgtcaatgacgaacgtcgaatactcctcctgctccgggccgtcatacacagatttgctcccacaggcctctgtggagggcggaggggtcagcgcagggcaggagcccaggccaccggccccgtctccacacagctgcgtcgctgcaggccccacccacagtacacatccttccaacgcaagctcctccagaaagggctgaccaccactcgtaaacgcagacggagatagaaaccattcccgcaggtaggcgagttgtgcccacactgagcccagggaaagcccattgggagctggatgctgagcaacctcattcacctctgagggctctgctgcccctagctcccagccttgtcaccaatcagccattctcacagggggatgtgcacatctctgcacgccccaccagcccgcccagccagaaccaggaggagagacacctgcagctggacgctgggctggctcatgggccctggggcagccctgaagagtcagctgagggagtgagcacgatggggttcagcacatttcacacccagctgccactgagcatgtccagccaggacaggcctagcccagggctggccgagcacagggcggacaccagtctgtgccgcagcttctaaagaccactgccccggaccccacctacgcaccggggccaccttcctaatcggaccacatcactcctgctgaaggccattctggtgcctcgcccctagcggacagccatggaacccttgagccagggcagggccctgtgccacctgagtccaaacacctgaaccaggtacacgtctctgcctcactgctcacagcgcctgggcacgcactcccggagccagcaccgatgccctgcagctgtgtccatctggatggaatgaatgtttgtgcccccaaatctgtgggttgaaatcctaactctcaagggatggcatcaggagatgaggcctttgggaggtgacaaggcgtgagggtggaacccttgtgcaggggatgggcgtccctatagaagacaccaaggaagctggcttgcctcttccacatgtgaggacacaatgagacactggcgggctgcagcccagaagaggacccgcagttaaaccagcactgctacgcccggatctcaagcttctcaggccttcaatctgggaagtgaattcctgctgtctgtaaccacccagcctatggtacaatttttacggcagcccaaactcaccaagaacttggtactgagaagtggctgctgctgtaccttcaaatgtggactggctttggaactgggtgctgggcgaaggctgaaggggtttgggggtgcagagcggaaaaggcatggctgccatgaatgtccttaaaggacaatgctgggggctcgggagaggagagctgcagagaagtcctgtcttaggggatatctaagtaaccctgaacagaatggtggcatgagcatgggtggcaaggctgttctaacaacatctcagacagaaaggacggccatgctactggaccgtggagaaaaagccatcctcgtgacaaagtggacctgtgttcatgccctcgtgttctgggagggtggaactcgcgagtgatgacatcagacacgtaattgaggagatttctaagcaaaatgctgtgggagcggcttggttcctcctgaccgctgacagcaaaatgtggggagagagatgatttgaaggtggaattgttgagcaaaaaggaaccagaactcaaaggctggttgagttaaaagatttgagaattaaaattccagcctacccatatctcaaaaaaaatgagacagcatgtttggaagagaccattaagcaggtggctgtgtggctatctgataaggagacaagtgtggggctgagccttggacttgaccaaccatctcagcaacagccgggagcagagaaggaaccgcaccagcagaggcactgccagaagaaaccaggaaacagagaaaacaggatgaaatgaaggcaggctgcggtgtcttaagccctacaagccaggccatagagctattcagctgtgaacatgtgccattcttcaagacgagggaagaaggaccctgaagcgggtagggccatcagaatgccactctcacccagaatgagtccatggaccatgtatcagatgcaaaattctcagctggaatattgattaaaaaataaaactggcaataactagaaaaaaaatcgcaataaggaatctgtccacccagccatcactcacccatccgtccatccacccatctgtccatctacccattactcacccatccatccctccacccatcactcacccatccatccatccacccatgactcacccatctgtcgatccacccatcatcactcactcctcggtccatccacccatcactcacccctcagtccatccatcactcacccatctgtccatccatcactcacccatctgtccatccatccattactcacccatctgtccatccacccatcactcatccctcggtccatccacccatcactcaccctatccatccacccatcactcacccatccgtccacctacccatcactcacccatccgtccacccattcatcactcacccatctgtcaatccacccatcactcacccctttgtccatgaactcaacactcatccatctgtccatccacccatcactcacccatccgtccatccacccatcactcacccatccgtccatccacccattactcacccatccatccatccacccatcactcacccacccatccatccatccacccatcactcaccctttggtccatgaacctaacactcacccatctgtccatccacctatcactcacccatccatccatccaccatcactcacccatccttccatccacccatcactcatccatctgtctatccacccatcactcaccctgtccatccatccatcactcacccatctgtccatccacccattactcacccatccatccatccacccatcactgacccacccatccatccatccacccatcactcaccctttggtccatgaacctaacactcacccatctgcccatccacccatcactcaaccatctgttaatccacccatcactcgtccattgctccatccacccatcagtcacccattggtccatctgcccatcactcacccatctgtccatccacccatcactcgcccatctgtccatccacccatcactcaccctgtccgtacacccatcactcaccctgtccgtacacccatcactcacccatcggcccatccacccatcactcacccatctgtcagtccacccatcactcacccatctgtccatcaccatcactcacccatctgtcagtccaccgatcactcacccatctgtccatcaccatcactcacccatctgtccatccacccatcactcaaccctcggtccatcctctcatcactcaccctgtcctccacccatcactcacccatctgttcatccacccatctacccatccatccatccacccatctctcacccatctgtccatccacccatcactcacccatccgtccatccacccattactcacccatctgttcatccacccatcactcacccatccttccatccacccatctctcaccatctgtccatccacccatcactcacccatccgtccatccatcactcacccatccttccatccacccatctctcacccatccgtccatccacccgtcactcacccatctgtccatccaccatcactcacccatgcttccatccacccatcactcacccatccgtccatccaccatcactcacccatccttccatccacccatcactcatccatctatccacccatcactcaccccagtccatcctctcatcactcaccctgtccatccatccatcactcacccatctgtccatccacccatctacccatccatccatccatccacccgtcactcacccatccttccatccacccatctctcacccaaccgtccatccacccatctacccacccactcagctgcctgccccgccatctgtccagcacacccatccaggtgctaggcacttcctctgtgccaggcccaggaaggtcactgcatatggaagctgaggagatgggagatggttgtgactttggtgacacaggtgagcccaggtgatgtggtttggatttgtgtccccacccaaatctcaggtcagactgtaatccctagtgttggaggaggggcctggaggaaggagaggggatcatggggacagacttccccattgctgttctcgtgatagtgagttctcacgaggtctggttgtttggacgtgtgtggcatctacccccatctctctctcttgctcctgcatgtaggaggtgcctccttccttcctctttgccctcccaccatgatcgaaagtttcctgaggcctccccaaccatgcttcctgtacagcctgcagaactgtgagtcaatcaatcttcttttctttatagcaacatgagaactaatacaccaggctatggggatggtgaggttgggaagcgcctggaggaagacacttccaaggtaaacagggtctgccagcctgatgcgcaagggtgttcccagcagaggaagagctggagctgtgatgcggggcgcacggcctaggaggagctgagcaaggttggacagtggtgcagggagcaagctgatcatggagggcctggtcagcatctttcagaacctgggtcttgtgtgtgatgacctcaccctctccgaggctccctgactctggcctctgctgtgtcggttcctgctatgagagggctgggaagaggctggctgatgccagacccactgtcttggccaccctgaggccttgtgccatcttcacagtatccagggacctcagacccagggacagcacctcgcacacttgctgggggagaagacgctgtggtgggtggtggcccatgagtgtgtacatgtgtggttgtctgcacatgtgtgtgcatgcctgcacatgggcctgcacatgtgagcgtgttgtgttcaactgcacatgtgtgcaggtattgttgccttgcctgtctgcacacacatgtacctgtatgttcatttcacacatgtattgctgggaacatgtgtgtacatggctatgcatacatgtgtatgtgcctgtgtgttagtgtaggcctggaacccacgtacacccagggcatgtggggctggagaacaggcgtggccaagctcacagatgggcagctgcacggacacccagggcatgtggggctggagatcaggcgtggccaagctcacagatgggcagctgtgcggacacccagggcatgtggggctggagaacaggcgtggccaagctcacagatgggcagctgcacggacacccagggcatgtggggctggagatcaggcgtggccaagctcacagatgggcagctgtgcggacacccagggcatgcggggctggagaacaggcgtggccaagctcacagatgggcagctgcgcggacacccagggcgtgtggggctggagaacaggcgtggccaagctcacagatgggcagctgcatggacactcaggcaggactcatgtgtttccaggccaaggcacacttgacacttctgggttaaatcaggggaatgaaaagaagaaaatctaacaggcataactccaggcacattccgctctatttccattctgagtgggactcaagggccctgtcatatgatctccaagagcagatccgagttctaccagacactggcatagaaacaaacgcagctgcttcacccccgtgggcttttcttgtctctgcctctcctgaatcacagacctcaaaccactgtccccatgtggtctaactgggcttatctggattgctatttcaattctgtaaagcaattcaatgtcacagataatgatacatactgcatatagatttgaaacacacggtgtgcctggcactgtttcaaatatatatgcagtatcgttatctgtgacattgaattgctttacagaattagatggcatgtgtgtacccacatatatgcatgctgacacatgtgcccaaagacatacatgcatactcacacgtgccctcatgtttccacacatgcacaaattcatgcatgctcacgtgtccccacacacacatgctcacacatgtacccacacattcactctcatacatgtcatgtccatacattcacacacactcacacacgtccattcatgcactcacacgtgtccacacattcacacatgctcacacatgtccacattcacacatccacactcatacatgtcatgtccacacattcacacacgctcacacatgtccacattcacacgctcacacatgcctacacatatgcacacatctcatacgtgtgtccgcacacatgcaagcacactcacatacgtgtccacacacatgcacttatccctctggaaaacaaaggaatgaaaaaataggtcctctaaagaaacttggcagtacagaggttacaagttaaattccatctaaaaattatctatagaacctattatacaggtaattgtcccccagatagctgcctaccctgcaaaaagcttttcgcatccatccgtgctacaaagacaactacatgtagcccacactacaccagaggctcagaccacaggttttcaccccacagcatgctcctgaggccggggcctcgccagccatcccctcgctgcacagatctgtgtgccgggcagactcaccctgcatcttctccagcttgctcatgtacaagttgaagagggagtagatacgctccgtctcacggtccccatcaatgtccagctggatgttggctgggaggccgctgtccagacacagcaagaacagaaagataaaaacacttatttaaacgatgcttttaataatgacattcatttttaaaatgtcactgaagaaagacaacgattgtgttggaagtgaaattcgacaggatcgatttgctgtccgtctgtgcacagccggtgtgttggcttgctgagcaaggctgacagcgtccacagcagcacggacagcagtgtcaccaggctgcaaaccggaactaactagcaacctctgcttcagttaccattggcctatttggacacgtggcaaaagatccttgctgtttagtatttaaaatgtgcttatcatttgtactaactgacctttcctgaaatcacgcagtactgagttatgtcttgtttaaatctattcctactccagaatcttatcaatacataagaaatttaggaagactaggtgctaaaatccccagtgtaatatgtaatacttgtacatttttagtatcatacagaactcaattcccaggaactatgaacactccagacctcatgtggtttattccttcagtcatttcaaacacagaaggaggctgtgtgcttgtttccctgctcattctatgtctgcttctcctatgttcacaccagcacacgtcaggctggagcgcggtggcacgatctcagctcactgaaacctacgctttctgggtttaagcgattctcttgcctcagcctcctgagtagctgggattataggcacacaccaccacgcctggctaatttttgtatttttagtagagatggggtttcaccatgttggccaggctggtcttgaactcctgagctcaggtgatccacccacctcgacctcccaaagtgctaggattacaggcgtgagccactgagcccggcctcatgtctttttataaatcttactttgtgttattatgaaaaacctccatagccgggtgtggtggctcacacctgtagtccccacacttttgggaggccgaggcaggtggatcatctgaagtcaggagttcaagaccatcctggccaacatggtgagaccctgtctctattaaaaatacaaaaattagccaggtgtggtggtgcacacctataatcccagctgcctgggaggctgaggcaggagaatcgcttgaacctggaaggtggaggttgcagtgagccgaaatcacaccactgcacttcagcctgggcaacagagcgagactctgcctaaaaaaaaaaaaaaaaaaaaaaaaagaaaagaaaagaaaatctacattgtacagaagcacgtctttgatggcttcagacaaagtggcctcacggttaatttcacatttgcacgcaggtgcaaccaacagggagggcctgataggaacgcgcggggctgttatttttagcaaaatgctgccttgtgcagaacgtgtgaaatatgctctttaatttagtaaatactttttaaaaggcagaaatgcttattatagctaaaacaattcttaaatcataaaatttctgaaacgtctgtaattttttccatactgattagaaattgtttccaacttatttttgtttgaagtatgacagtttttcccttttcttcccaacttctcttgtaaaaaaagaagtgggtttctgctaatgaactgatcagatgtcaatactgtatatgccttttgagctgagtagctcagtatttggatacttggtcatttgttttattaggtaattgataaaattgtgtcacttattcatgttcaaccatatatttatgctgtctggggatgggtggttatagttctgtgtgagaaataatttgtcagtcttcaacagcttgtaaaaactttgcagtgagagcttaaacatctaaataaataatgaaatgcatttatcataaaaaaaagaagaaagaagatgaagtgaccaacattaaaacacatccctggccagtcagggagttcatgtgggtaatcccagcactctgggaggccgaggcaagaaggatcgcttgagcccaggagtttgagcaacaccaccctgggcaacatggagagaccctcacagtgagacctggcaacatagtgagaccccgtctctacaaaaaaccaaaatttaatgagctgggctggtggcatcagcctgtaatcccagctacttgggagagtgaagtgggaggactgcttgagcccagaagtttgagaccagtctgggcaacgtggtgaaaccccgtttctacaaaaaaccttaaaacaattagcctggaatggtggagcacacctgtagtcccaggtacctgggaggctgaggtgggaggatggcttgagcctaggaggtcgaggctgcagtgagctgagattgcaccactgtactccagcccgggtgacagaacgagatcccatctcaaagacataaaactaaaaaagcatccccgagctgggagaactgaggctggctgtgggtgtgcgggataggggaggctcccgagctgtccggcctcagcggctggagcctcttgggacccacagatctgccaaggcagtgagcaaactcggcagacgtgttctcatggagataaatggcctggaaggaagcctcctgggactgtgttccctgcacggtcggctgcgggtggggacaggccaggttttctctcctcgtcaggctgcaatgcttcccgctgtcctgggatgcgaggacatgggagagcgctggcctctcctgggggattctggggcggtggccacgcatgcctgagcagcagccaggcccccttcctgagcttcagcctctgtgtccacgaagcaggatctaaggtcccacctctgaggctgtgggaggattaaacggtggcccagcatggagcacagctcatcccctgcagggcccttatgcgaaagcatcacgtggccacaacaacagcgaggtgcatctcacggagcataaccagggggaccgccaggcacccaggcctcctccttaggaccggcagatatgacccaagcctctgtgcaactgccagaggcccggctgatggggggccctgctgatggggggcctgacagggggcccagctgacggggggcccagctgacggaggacccagctgatgggggcccggctgatggggggctggctgacggaggacccagctgatggggggcccggctgacgggggcccggctgacgggggcccggctgacggggggcccggctgacggggggtccggctgatgggggtccggctgacggggggcccggctgacggggggcccggctgacggggggcccggctgatggggaggcccggctgatggggaggcccggctgatgggggacccggctgatggggggcccggctaatgggggggcccggctaatggggggcccggctgatgggggacccggctgatggggaggcccggctgatggggaggcccggctgatgggggacccggctgatgggggggcccggctgatgggggggcccggctgatggggggcccggctgatggggggcccggctgatggggacccggctgatggggggccgggaagacaacgggctgctgcgtcatgtggaatcaaggtgggtgtcctgggccagacgaagctttcagggaggggcttgctcccagcctcctcctagagaagcaggatggccacggcctggggagtcccccttcaccctgacctcccgctcccccggggcagggcctcaggaagaccctcgaaggcctgtggcaccctggagtctgcgcagagccttccagaggctgggccccagatgctccctcgagggaggacccctcgggtgggaggctcctgggaggaggcgagggcagccctgtttatgtgcagcttacaggcaggcatgcactgtctgctggtccctccctactcagccccttggccacatttcctgcacagtgcacgagctgggcaccgaggcacagacctacccagtgcagggcgagcagcccggagccgagtcggatggcgccctacagcacagccagtggccgctcaggtaggcggacgggtggtagacggtgaggcgcttctggttgcactggctcactttggtgagaatgtcgatccagtccttggcctccacgcagttgttggcctggatgtacagcgcacgctctggctggatgacctggaacatctgaggacacaggtgggctcaggacagcgcacatgaggtctcgtggctgagcacgtgcaagagtccaccaggcacctggccgtcctcgccggagtcgtaagaggggacgctgagggtgcacaggcccaaaagtcctggagctctaagccccagaagaggccaaggccagggggtgcatggagctctctgccaccctaaaacctgacagctggggccgtggggaatggaggtgagaactggtgcagctggagatgtggccaggtggccaggaacagcttggccaaggccctttatgtcctggagccttggaggtctccattcaagacaaaagaggggccctgtggcctccccacaaggccctcctgcagctgactgcaggcatcccatccacgtggtgctcgtgctgtgtcagcccaggtggcccggcctgctcagctccttccccaactgaccagcccaggattcttcctcctcctcccagctggggttagggggctgcttcctcttgaagcgtctcggggcagcaacaacctttaccatttattactcattcaacaaacatgactgagcaccagcactctcctatgtcccggagacaaagcctggcatagagtttctactgaacctgcagccaccaagaaagactaaacgagggcaggtgtcagcagaagctggaagtgagcagtcctggtgctgtagtcggcgttgactcaaagttagttaagcagggggtgggggcaaagggtgtcaaaggcagaagaaatgggaggcacaaaggtcctggggcaggtgggacaggggtcctgtgattggagggacaggtctcccggggcaggagtgacagaagccttaggattagagggacgggggtgctggggcaggggggacagatatcctaggattggaggtcagaagctcccagaaggagccggctctgttgcacacagaagacaggttttctgagtaggagactgactggaggttgggagggctctcatgtgggacttgcccttaagtcaggagtcagggggacagtggccttctctaggggacgggccttctgcactcatctggggaggatttgggctccaggtttctggtgaacagctgaggtcttatttacagaggccaggagcctcccgccttgcacccggcacatgtgtataggtctcggactggacgcccccgtgcatggctgtgatcccccatggagggcgtcctggccatcatcccaggctcggccctgccaccaggagcagccttcagaaaggtctccccagctggtgagagcctggcctggcagtggcctcaggggaatcgggctctgaggaagtcagtgggaatgaacagctgggaacaggcggctgaaactagggaattattgggaatctatgtgaagggctggaggtgcttccaggacatgtccacactgcttccttcgagggacggtctcagggccaggttccggccatccccctcagtcagcaggcattgagcccacaccctcctcttcccatctccccctcttcccaacccttctcttcccagccctcctcttcccagccctcctcttcccatgccctcctcttcaaattactctccaaacttatgccttttgcaggatctgtctggactgcctgtgaataacatgctagtaaaattctgccaatggtaaggaacatgcgtcaactttggcacgaggcccagggactgtgccttccctgcaactgttctatgaccctcatgctgcagtcggggcacagaaggcttgtcccagccagcatgtgtcagggtacggggtcagcctcaggatggcacggacggcggggtcactggctgaaggggcactgagtcaccagggagaacgtggccagcggccgactctgggaggccaccacacaatggtgacgccacggacacctctaggggattcccgccagaaatgcatcatcagaacctgccacgtcggcacatccgacaaacccacagggagggatgtccagaaaaccgaaggcctgcacgcctcaaagatgccaaggccaccacacacaaagaaaggctgggagtgtccagtgggccagacggagggggcagcagaatgcagcgcagactggatccagaggggaaggaaccacagccggaagaacgggactggacagcggcaaactcgaatgtggtcgcgccggcgacgtgcgatggtggctgctgtggttttggggactgcacggtgggaaacacacttggaagtgttgatacattcagaaaagcacgggcgggaccgtgaagggagaaggaacaagtgtgactggggaacgaggcgacatgtgggtccgggtcaagcgtgaccggggaacgaggccacacgtgggcccgggtcaagcgtgaccggggaacgaggccacacacgggtctgggtcaagggtgtgtggaaagtacttgttctactcgtgcaacttctataaattcaaaattatatcaaaataaaaaagcttccaaaaggaattccagacggtcccaagcctgcttctgggatgtctttgacagagggccccttgacattggggaccctgcgggggacgccacctgaagcagctcaggccccaccttccggcaggttccaccccaccccggtgaccccgggcacagagagtgtggctgctttgatgcgagattccgacacaaactcaccagcacctggtgaacaacccgagtaacacgaagactctgagaagcctggagtgcagtgggtggggaagggtgagcccagggccaggtacgggaagagagcagagaaaacctggccaggcctcaacccgaaagagaggcttgggggccccacactcacgtttttcattttgaaagactcctcctccagcttctccactgccaggatgttctcgatgggaatgctgtagagaggctggtcccctgcagcagagatggactgtcagtgggtgcgggccccgctgtcccggctggggtccgggtggggctgaggggtctctgccggggggtctcccagggggtctttaccggggggtctctgccagggggtctctaccggggggtctctgccagggggtctctgccagggggtctctaccgggggtctctgctgggggggtctctgccagggggtctctgccaggggtctctaccgggggtctctaccggggggggtctctgccagggggtctctgctggggggtctctgctgggggggggtctctgctgggggggtctctgtcaggggatctctaccggggggtctctgctggagggtctctgctagagggtctctgctggggggttctctgctgggggggggtctctgccaggagggtctctgctgggcggtctctgttggggtggtctctgccaggagggtctctgctggggggggtctctgttgggggtgtctctgctgggggtctctgccagctgggggtctctgctggggtgccctgggccggaggaggtgccccatgttcatctccttggggatgatggctgaatcactgacaggctgcaggtgcgggggctgaggaagcctgggacccacctggccctgccatgcacccaggctgggcccaatgctcgcatcctcacagctgccgtggcctcaggctctgtccccagaacatgttcccgttctgggacatgaacatgggagaaactgctagatatttcctaatctagatctgagccagcagatctgacagcgaggggcaggaggtggtgggaagccccgtctacctcggcggagcggcaccctggccatgacgaggcgaccagaggaggaagggacgtggacagaaaagcaccttactgatgtggtcagctctgcgtttactggttctctggggaagcagatttccctcactttccagcagcaggtctgaaagaccccttcagggatctttgaagggagaaccagaagcagagggctctgggtcaccgcggccccgggctctgcccgcagcactgaatccttcctcccctcagctctccccctgaaaaagcagactcagtcccagggcccagcacgctccagcaagagccagggaaagcgaccttgctccttacctttgcttttgtggtaggtaaattcatggttggtcaagcgaaaccatctcttcttaaaattcttcatcccaaagcgcttccgtccttgggccctcttgatcatgaacctgtgtgaagagcacacagggccggggtccgggcctcagctgcctccctgcacaggtgaaaaaccacaccccccactttctgcgttctgagacctgaggcaggcagtggattttcaatatcttatcattttactccgagtgatgagattaaaattggaaggcaatgcctctcctttgaaaagttgagcgctgactgctttgagtcaccagttggtgatggcaccaggttttaggagatctccaaccctcctgcctcccacactgaactttcaacagtggtgctgccactggaaatgccaatgcgatgctcccacggcggacctgcggccgtgggctcagggtcagggagggcagcggacgcccacacaacacggaggacctgcggccgcggacctgggatcagggtgggcagtggacgcccacacaacatggaggacccgcggccgcgggctcggggtcagggcgggcagtggacgctcacacacagaggacctacggccgcgggctcggggtcagggtgggcagtggacactcacgcaacatggaggacctacaggcgcgggctcggggtcagggcaggcagtggacgctcacacacagaggacctacagccgcgggctcagggtcagggcggacagtggatgcccacacaacacagaggacctacggccacaggctcggggtcagggcgggcagtggatgcccacacaacacggaggacctgcggccgtgggctcggggtcagggcaggcagcggacgctcacacacggaggacctgcggccgcgggctcggggtcagagcgggcagcagacgcccatactcagaggacctgcagccacaggcttggggccggggcaggcagcagacgcccacaaaacccacacctgtgttgtgcgggagtcacgcaccagcgcctctgccagaccaaacctgccccctcagggccagccctgctgtggtagaaggcgccactgggccacgtcctcaggaaacgtggggagcaggagacaggatggccaccgaggatgcaaggcctcagcgaggaggacctcaagccttgccctgggcagggtcctcgaacaccctcccggcagcccagggccctctgaggctcggccttcattgccgggcaggggtccctgaccagaaccggcggccgagctggaggagaagaaagtggccagacagagtgactggaggacagaggtggaagctgaggacgagaagccaagctggagagacagagtggggaggtgggcgggggagacgcacctcgacaagcgcactcagaaatcggaaagaggggctttgagcagcaacacagccagatgtggccagagagctgtggacgcacaccggagggtgtggaagctgctgggagctgttcaagagagaaaagggcggggcgctgggagccgccaggacagcgcagttcacaaccagtggatgccgaacgccgttcattccagggattcacaggcaggaagtcagcccaggaggctgttgaggaccagcaggacccagtgggatgcgcagggcggggcctacacagacgggggttggggggggactgggagctccacgacatgccggcctccttgagggcaacagggcgcctctgagaagactctggaccatgtagcagttagatttgagtagcagtcttgttataaatgttttcggctttaggatttttttaagaaccccaactttctgagggccttcagtggatgaggctgcatgtgaattttatgtgcagtttccaggttaaggcagcactgagtggagagaagccagtggctcctcactgcacagctctggtctgggcgcctggctctccaggagtcggttttctaaccgggcccatcgcgcgtgtgggacggggaggcaggagccacggctaagccggaagcctcaggctgaaagcagctcggccccgcgcagccacggccaactcaactcagcaaacacacgctgcgctgcagaggccccgtccccagtcctgtgtcccagtgggtgaggacacacacagccctgagagacggcagaggtgtgggagcatctcagcacagggtgagccctcaggaaacatggtcatcaccacccccacacatggacgaacatggcaagacacacttggcaccaagggctgagatggcagaaccgaggccctaggacggcccatgcttgcacaaccgagggtggccctaggtttggggatgtgacagagctgaggtgccggaggagaagctgatccaggggctggaaactcgagggcctgatggaccaaaaccttggtgtgagtcgcaggtggtgcagctgctggaaggagctggtggagcctcagctgcatccagggcacctgggaggcgcctgtccttgaacctctggctggtggcacctgggaggcgcctgtccttgaacctgtatctacagcagcttctcggcgtcagacacacaagccctgagtgtcctgtgttgctttagggattacaggatgaatatctgttgctttgaaagctgtgaatttatgaaatgtagaaagtaaaaagtttcctcttcaaagtttcccttcttgttaaagaataaatcataagtgttagaaataatagtttcttttaaagactaacttccttcaagcctccttgctttgtgctaataactctttgttaagctctatcctgtgtagctgttggacgtgcccacaggctcgtaatatattctgtgtccttgtaccttaaccaaggcaattgtgttagacgtactcataggcatgtcccagctcacagcctatgccccttccttatttaaacatattattatttttctacctatttaaaaaagttttaaattattagccaatcaggtcttaatttagattgtgaggtccggctccaggcaatggggacaggacacgacaacaggaacctcgtgcgtaaggaataaatattctggcgtctctttattctgtgtgtgcccttgccattactccttctgccagggacaccctttctgcagaaagtaaaaattgcctcgctgaaagaactttttgtctaaatgctaatttttccttatggcaccgaagaacaaacattttgcatttctaacatgaaatgtgtgtattgcaaatgttattggttaatatatgattaagttaaatgaaggtgattttaagaaaaatagcaatgtaagtaatgccactggggtatggtccaccagtgacccagagatgatccaggtttcagcagatggctctaacagagtatccacaaaaatagacaaatgggacttaattaaactaaacagcttctgcacagcaaaataaataaccaacagagcaaacagacgacctgcagaatgggaggatatttgcaaagcacagatccaacaggggactaacagccacaatttagaaggaactcaaacaacttaacaaaaaaaataaaaattaaaaaaaaatttaaaagtggccaaaggacagggggatagacgtttttcagaagacaaatggccaacaagcatacgatataaagcccagcgtggctcatcacctgaggaatgagagccagagctgcctgtgaccccacctcacgccaggcagaacgaagccacctgcgaccccagctcacgccaggcagaatggagccgcctgaacccagctcacgccgggcagaatggctgggatcaaataaaacacggaaaaatgacagacgctgcagagctgtggaggacgtgagcgcttgcacgctgtggggaatggaaattagcgcttaaggaaacccacggagatttctcaagaagctaaaggcagagctgccattcgatccagcaatcccacaccaggccccacccaaaggaagagcaattaccaaaaagacacctgcatgcgtacgtttaccgctgaaccactcacaacagcaaagacacggaatccacgtgtccaccaacggacgactggataaagaaaacgtggcataaatacaccacgacatgctactccaccatcaagaggaaggaaatcttatgttttccagcaacgtgaacggaactagaggttgttatcttaagggagatgactcagagacgaaaagccaaacgccccatgttctcactggtccataggagataaacacggaggggcggggcgctctgggacacgtattcggaatcacagactgaggcctcggaagggtggaggtgggagcgggagaggaatgagaaattactcagtgggcacaaagtgcccgttcaggtgacggtttcacgagaagccccatccaatacaactgcacttgtgcccgacatgttggcaaacacataaaaaatacaggaacatggtccacaccaggcagagcaaagccccgagcgggagtgggagccgggccacaggacggggttggtggaaacgggcagacgtgtcagttatgtaaggaaggttgatgggctctgatgctccagggacctctgggtggaggttgagggaggacaggcctgtgtcagaaacacggggtggctgtgggacacagacgtccccctccaaggtcaccgagaaggtggcagaggggtcccaggctgaaggcgcaggggccagacccccagggctgtcccctctgactctggttccctgagcaaagagccctcgggagcctggagggaaggccagccccaagtgcgggtgtggacaacacggccagtggtacagaaatcacaaggctgctggccagcaagggaggaggctgcccccgactagggaatcttctggaatgtgctgggtgctctggggactgggggcccccatccctttctcccctccggccctgccggatgccaccttacccttctcccccctcctgccctgccggacaccaccttacccttctcccctcctgccctgccggacgccaccttacccttctcccctcctgccctgccggacaccaccttacccttctcccccctcctgccctgccggacgccaccttacccttctccccactcctgccctgctggatgccaccttacccttctcccctcctgccctgccggacgccaccttacccttctcccctcctgccctgccggacgccaccttacccttctcccccctcctgccctgccggacgccaccttacccttctcccctcctgccctgccggacgccaccttacccttctccccactcctgccctgctggatgccaccttacccttctcccctcctgccctgctggacaccaccttacccttctcccctcctgccctgccggacgccaccttacccttctccccactcctgccctgccggatgccaccttacccttctcccctcctgccctgctggacaccaccttacccttctcccctcctgccctgccggacgccaccttacccttctcccccctcctgccctgccggacgccaccttacccttctccccactcctgccctgccggacgccaccttacccttctccccactcctgccctgccggatgccaccttacccttctcccctcctgccctgctggacaccaccttacccttctcccctcctgccctgccggacgccaccttacccttctcccccctcctgccctgccggacgccaccttacccttctccccactcctgccctgctggacgccaccttacccttctccccactcctgccctgccggatgccaccttacccttctcccctcctgccctgctggacaccaccttacccttctcccctcctgccctgccggacgccaccttacccttctcccccctcctgccctgccggacgccaccttacccttctccccactcctgccctgctggatgccaccttacccttctcccctcctgccctgctggacaccaccttacccttctcccctcctgccctgccggacgccaccttacccttctccccactcctgccctgccggatgccaccttacccttctcccctcctgccctgctggacaccaccttacccttctcccctcctgccctgccggacgccaccttacccttctccccactcctgccctgccggatgccaccttacccttctcccctcctgccctgctggacaccaccttacccttctccccactcctgccctgccggacaccaccttacccttctccccactcctgccctgccggatgccaccttacccttctcccctcctgccctgctggacaccaccttacccttctccccactcctgccctgccggacaccaccttacccttctcccctcctgccctgccggacgccaccttacccttctcccctcctgccctgccggacgccaccttacccttctcccccctcctgccctgccgcccccctcctgccctgccggacaccaccttacccttctcccctcctgccctgccggacgccaccttacccttctcccccctcctgccctgccggacgccaccttacccttctcccctcctgccctgctggacgccaccttacccttctcccctcctgccctgccggacaccaccttacccttctcccctcctgccctgctggacaccaccttacccttctcccctcctgccctgccagacgccaccttaccctccttacccttctttaagcacgatgggctgctcaacactcttggggtctcttctccccgaggacgaaatcagatccaagaactaaagttggaagaaatcaggtcaccgggaggaagccacacatctgacgtgcacggctctctgtataacaacagcgtcggcggctactgcctcctttgtaataccagtggagacagaatctgggcaagtgagtccttccccgagggctgtggggcctctgctccccactgtgccaccccagccccggcactgccacagagatctcaggtgagaggccgggctcaggcaacacctggggatcaacctgcatctccagaggccacccaggggtgactctaagcagggaatctgggtcccggtagtgaggaggctcaggcatccctgactgtggggaggagcagagccctggggcctggaggttgcccccacgcaccgcgttcctgactgtggggaggagcagagccctggggcctggatattccccccacgcaccgcgttcctgactgtggggaggagcagagccctggggcctggaggttgcccccacgcaccgcgttcctgactgtggggaggagcagagccctggggcctggatattccccccacgcaccgcgttcctgactgtggggaggagcagagccctggggcctggaggttgcccccacgcaccgcgttcctgactgtggggaggagcagagccctggggcctggatattccccccacgcaccgcgttcctgaccgtggggaggagcagagccctgcggtctggatgttccccacacaccgcgttcctgaccgtggggaggagcagagccctgcggtctggacgttccccacgcaccgcgttcctgactgtggggaggagcagagccctgcggtctggacgttccccacgcaccgcgttcctgactgtggggaggagcagagccctggggcctggaggttgcccccacgcaccgcgttcctgactgtggggaggagcagagccctggggcctggatattccccccacgcaccgcgttcctgactgtggggaggagcagagccctgcggtctggacgttccccacgcaccgcgttcctgactgtggggaggagcagagccctgcggtctggacgttccccacgcaccgcgttcctgactgtggggaggagcagagccctgcggtctggacgttccccacgcaccgcgttcctgactgtggggaggagcagagccctgcggtctggacgttccccacgcaccgcgttcctgactgtggggaggagcagagccctgcggtctggacgttccccacgcaccgcgttcctgactgtggggaggagcagagccctgtggtctggatgttccccacgcactgcgttcctgactgtggggaggagcagagccctgcggtctggatgttccccacgcaccgcgttcctaactgtggggaggagcagagccctgcggtctggatgttccccacgcaccgcgttcctgacactgagtctgcagccccagggctccacgactgcagcctagagtgagtccggccaccacacacactgaggtgggacgcgccctcattcggggggctcagacacagaacaagatgggcgagggccccgttttggccccaaaggcagtcacgccaaagagtttaccaactgtgggaggaggtgtcccaggacttgggacaaggctgtctggacagcgctgtgaatgcaccgaacgcctttattgtttaaaatcgctaatggccaagtctgtgtcatgtgggttctatctcaattttaaaagagaactccgtctcctgagcacggcacacgggcggtcggagggtgagtcgatacttacgttcttcaccgcatcagcatatttctgctcattgaagaattcataaaatgtagccatgtaggactccttaaaactcgcctaaaatgaaacggagatcactcgaggacagcccgaagtacctcggctcacggcccaaatctgaaaaagctagaggcaagaactgtccaagcctaaatgacgataaacaggcaaagaacccggtgttaccgggcaagtgagagcccgcagggctgcccggaggacgaatcacataaatcgctcaggcgccaacgaagaccatcagacctgccagtgcccgtgaggtctccaagcaccctttggcatcagtgactccgtcctggccccgggctgtccctcacacctgggtcccaggctcatgaagaggtacgttggggcccagatgtggctgcctgggaacctggagtcataggccagggtcccagagcccccacgcccatctctcgcccgtggggcataagggccgctctgaggtgggaagagggggcagggacctccatcacacggggaagtggaggcacccagggattcgggggggcctttgcagccaccattcctgaggctcgaccccaagttcctgttgtttccacactgaggtcactgcacagttccctggctgtgaaatgaggtgggtttggtgcagacctcggaggaggctcaagtgcctgttatggagtttccagcccacagcgcagggcctggctggtgggaaagagcggtcggtgcacctcggcctgcctgcgagtgtggcacatcttttactcactcggactcagagaaacccaacgtttgccccaagcgggctgctcctccagtgggggcctctgctccccaaagccctcatttctacctgggccccaccaagaacagggaaccaggaggcctgggcatctgtgcaccacagcccagccctctccagacggagccccgagggggcccgaaggcatcgaactgccctggcctggcccctgcagagacagccttgggcctcaccaggagcactgcccccgggacgcctcaaacgtcagctctgaccccctcaaacacacaaggtgctcttagggggaaatggggcagatgcctgagggactcctgacctggtggcaccagatccagtctgaagggacgaggatggaggacggaggttcatatccacagggagagaggggccctgggaggagggggccgcgtggggaggggagcgccacgttgggaggaggcggccgcttggggaggaagcgccacgtggggaggaggcggctgcgtggggagggaagtggggaggagggggctgcatggggaggtagtgcagcatggggaggagggggccatgtgaggaggagggggccgcgtggggaggtggggaggagggggccgcgtggggaggagggggccgcgaggggagtagggggctgcgtgacgaggagcctccagcaccgcaacgcccaggaggcgccaggttaggccatctgcctggcctgttcagccgcttcccacacctgacaggtcagatgctgctcctgccacggggccggcgacgagccacaggctcccgaaaaaggcaaggggttcactttaggaggggagaggtgagcgggacggggacgctcaggtcctgggtttcaagagaggatgtggtgccggctttgattcttgatctttatcttacgactctctcaaatgtgggaggtttttcacgtgtattttctgaagagagaaaagaatcagttgtccctaaaaagagaaaatgaagaagagggactcacagatttggacttggacaggctgccgagggtctgaacggtcttggagatcaatgtcagcgtcctggacgtctgggggtcctggggaggcgggagcaagaaaggtctatgtcagcatcacagaaatgctgtgactgtcccagatcgaggggacgaaatgcaggagtcacctcagagctgctgtggcttgtgcatgagctacggagaaacaggggtagcgacgcagatgggactggagggggtgggcgtcccacagtctcaggagctgctgagaccatcccgcaggcaacatccgacggcaccgcggtgacccactctctcggcccagcgtgcagggtgcatctcaaagtcgaaagcatcaggtggggtcatggctctggggcgctgagtctcggggtgctgagtctcctggccctgcctggggctcatctcagccttcacagggtttgaaggttcaactcagaagtgctgggggccgggcttggtggctcacgcctgtaatcccagcacttcgggaggccgaggcaggtagatcacttgaggtcaggagttcgagaccagcctggccaacatggtaaaaccccatctctaataaaaatacaaaattagctgggcgtggtggcgcacgtctgtaatccaagctactagggaggctgacgcacgagaattgcttgaacccaggaggcagaggttgcagtgagctgagatggtaccactgcacgccagcctggtgacagagcaagactctgtctcaaaaaaaaagaagtgctggggaatgggcaatccctcacgtcctctcgccctggccatctccttccagctctgccacccgcacgtgcaacacggtcaccccagatccctgtaccctgagagctgcggccccagcaaccacattggggcctggagaaaatcagtgctaaataggaatctgttgactcaatacacggatgatacgccgatcatcaatactccatatgtgatgggcaggggaggagagcagggcggtgaccagcagctaaaaccctggacaaaccgtccactgcttttgtgacactgtctcgactcccccagaacgtacacagcttaaataggtcggtgaaccacctgcaacgaggacgttccaggacccagcgcatccaccagcactccccacgcaccgtccacacactccacacacactccacacgcactccccattccacacaccttccacactccccgtgcaccgtccacacactccacacacactccccattccacacgtcttccacactccccactccccatgcaccgtccacacacactccccattccaaacgcactccccactcactcattacacacactccccacgcattccacacacactcctcattccatgcacactccccatgcattccacacacactccccattccacacacactcctcattccacgcacactccccactcactcctcattccacacacactccccattccacacgccttccacactccccacacactgtccacgcactccacacactcctcattccacacacactccccattccacacacactccccactcactcattccacacacactccccattccacatgccttccacactccccacgcagtccacgcactccacacactcctcattccacaaacactccccattccacacacactccccactcactcctcattccacacacactccccattccacatgccttccacactccccacgcagtccacgcactccacacactcctcattccacaaacactccccattccacacacactccccactcactcctcattccacacacactccccactcactcctgattcctcacacactccccacgcattccacactccacacggtcggccccctacagccacgcagatgccccaacccaggccggcgtcgcaggacagctcagaaagcctcggtccctcagccggtcactcaccgtgtggtgcggcgtgagctggaagaggttgggggagagaatggcgggcgcaaagaacctcaggaagatgaagctgctcactgcagtgtacctgacgtccgggtcatctgcgggagagagaagcagggtgaccgttttcctcgggcacaatggcctcgtggggacaccatgccccggccccctgagggtccgcagggaagtccagccacagtcctggctctatctccacctgtgtctgtctctctccctctctctgtttccctctctccctctctctgtttccctctctctctccatctctctgtctctccccctttgtctctctccctgtctctctccgtatctctgtctctctctctctccctctatttgtctctctctcatctctctgtctctctccctctctttgtccctctgtctctctccctatctctgtctctctctctctctctccgtctctggctctctccccccctccatctgtctctctctctctccatctctttgtctctctccctctttgtccctctccctgtctctctccctatctctgtctctctctctctctccccctctctctctccgtccgtctgtctctggctctctctctctctctccatctctctgtctctctccctctctgtctctctccctaactccatctctctctccccgtctctttctctccgtctgtctctctctccatctctctgtctctctccctgtctctctccctatctctgtctctctctttttctctctttctctgtctctctctctccgtctctctctccctgtctctatctctctgtctctctctctctctctccgtctcgatctctctctccatctctctccgtctgtctctgtctctctccatctctctctctccgtctctatctctctctccgtctgtctctgcctctctctccgtctgtctctgcctctctctccgtctctccctgtctctctctctctctccttgtctctctctgtctctctccttctgtctctgcctctctctccatctctccctgtttctctccatctctcatcaccaccacacagcgcagcccctttggtgtctcattccacagtggtctgtgctcatctgggtgagaggatgtgttttatctcttcacttccaccttgttcaaagtgggtctggggctgggatgtgcttgggaactgcctcccccagaaccctgggcccctcggccggcgctgtctgactgtctgatgtcctgagaatcaggggtggggacagcgtttgtctcctggggacacagaagcgtggacggctctgcaggaccatggccaccccggggtgtctgcagctgtcccgaggccacaggacacgcaaggaagagaggagccggcagcaaggccctcgctgagcctctcagcgccccatacatagcctgagtcctggcggggtcttgagtatcgcaggtgatgggtgggtgcaggcacccagctcctccctgagggtcggcaaggttgagaagtggggtttgggtgctggatgcccaggtccctaggggatctccggcttgggggtttgaagaaagggcagctcccccaggggtcctgtctcttcgaagacacgggcaggcagagcccccaacaccactctgggccctgccagggtcggccacaaaaagaaaccactgggaaaacccaggggtccacatcaggaaaattcacattccaccccgacaaagcctggccacccttcccggcccccccagagaccactgtggtcgtgaactccagggctgggcccctctagagaccactgcggtggtgatctccagggctggggtcccctggagactactgtggaggtgaactccagggctggggtcccccagagaccactgcggttgtgaactagggaacactggcccgggcacaaaccccggaaaaatccagcatcggaactggggttcacgaccccgcagttctagtctagccagggctgcggggggttctgcctgggtgggagtcaccctgcacagcgctatggcagtttctcagcaacatgagggtgttcagggcactcaccctggaagcgcttggccgccgcctcccggagggagaagaagatgtcacacatgacggtcgggcagctcaccccagactcagtgatggcgtggaagacgcggtccacatactgccgtaggttctcctgcaacgggacacggcactgggacccactcccgaggctgcccacaggtgcgtgtagcaccagggcacgcccagggaggggcgcgtggggaggggctgagggcgggcgcagggcagctgcggcagtgagacacgtgtgaacagccactccctggaaatctgtgctgggagctgtggcaattcacgcgtgaaaatcactacacaggcaccacgtcggctccccggctcggccccgacctcgtttactgagtggggaatggacgttcactagaatgtgcctgcccaaggcaaagagctctgtcatttacatacagaaatgacgaaacagcacgctctgcaagaagtatcatgtgaagtgactaaaatgttggagcaagttcaacatcagggagttttgctgttttaaaacgcagtacacagctctggggacagcctggggaggcagggaggccatcctgtcctaggaaaagggaggggcaggagccattgcccaagggaaggaggagccggggcggaggcagagctggtcaggattgtccaggggaggcagagcagggtgtgcagggcagaccctccgggggggcagagctggggcatgcagaccggatcactccaggggaggaagagctggccgggaccccccaggggacgcagagcccggcacacaggccaggccaaaggtggtggctgaggcctcccagtagtgcagccagcgtactgcagccgggtgaggcgggtatccccacgcctggtcctgctcccaccccaaccggggtcacggggtgagtcagagcttccaggcagccatcggctgaaaaaccccaagcaggtgactggctttggttggttcatgaacaaaacctaccatgttgttttcaaggttttctccgtctttcaacttcacagggtcgatttcacagggtttgtggctctggcatatctggggagaggtttaagacagggctctgtgagtgggttctgggggcacaggcagggagggtggaaggggtctcaggcctggctgagatgtagaccctgagcctcatccagaaaatgccacgacagctccccgaacccggccactggcacggaggggcacggtgaggccggactgcagggccaccgtggggtggtgtcgtcccgagcctcagctgcaagggggcaaccctgggcctgtgtcactggctgcggagggacaagtgagaggtcaggcgcaaacactaggcacggggcccagtccatggccgcgatcagacgagccgggctctctcagggagcgatgtgcgcccgcgatcagacgaatcgggctttctcaggagtgatgtgcaccagcccacacggactaggcctcacagggctttaataatatttttacttcaaaatgctgccatgattttgcccacagagcaaaccagaatgctatgttcaattttctcacatttgcaaagaacctgtttacaaacccgctcataaacggggggcacagcctggcgggcatcagagggtcaggtgaggagtgggtgtgcgggcatcagagggtcgggtgaggactgggcgtgcagctcaaacatgccacgcagccagggcccaaacacaggggactgcaggacatgtggagaaagaaggtctccctgggaagagccaggcttttcttgcatgttctcctttgtggagtggtggattttcttatgtatagttttaatttgggagaatttggaaggttctggagtacacagggaacatcctcttgataaaagtgaatgaatcagcatccccgtggcgaggccagaggggccgacattcaagcccagctcgtggtctggctggatcccagtgcagtgccctctgttgggggaaatcctccccacgcctcgtgaggctgaggactctcggccccgtgctcacctcctcgatggcgggcttcagggtgacatgcaggtaatgcatccccgccagcttcatggtctcgtcgatgcacttggacgccagtgagtttcctcggaagatggtgttggggtccctgggaaatggcgatggggacagcgtttgtctcctggggacgcggaagtgcagacggagcagagcctggccccgagcacctgcctgtgggctgtgaggtcagtgcacgcccatcagtcggcttcctgacattttacaaggagcacaaccaggccaggtgcttggaggccctggccatggaaccgtcctgtgtcaacactgccagagggaaccgttcggctacctgcgtggccaccagctcaggaggagcctggctggccttcgccctcccgccctctcccctctgcggcctctgcctgtgcagagagttgggcaccagaccctggcagcatccaagggccagcagagaagcaaaccctcctgtcagctacagtggctgcaggtgcagccagatgtttctagaacagggcgtccggaaacagcactaggcaggtcctgagggaagctgtgctccatttttgtgggctcccaaagtgccccagggaggggacctgagctgtcctcgagccccaggagccgtttcccctccccactcactcactctacccgggatttcaaaggcaaatgggactttcaaaaaaaaaaaaaagaatcattaactgggtctgtgaaagaaaacctgaatcaacatggtttctggggacccttgaattccctcaagccctgccccaggacacgtggttctcggcgacgaccttgccatccctgtagcgggtccaggccgctctcccccggggcagggtgggcactcactgggtccgcttcacctccgcgctggcgatggcactgatgaatggcaccaccctgccatagtgtaggaagagccgcaccagcgggacggccgcctcctgcttctcccggcaaacctcgcccaggatgtgggccgcagacgctgacacgggctgcggggaggggtgaggtcagtgccagggcccggggtgcaggaaccccagaggcctgtccccaccttggctggggtctcacttccagccacaatagatacggctctttgctgagacagaaacacacacattcacaaaaacaccaaacttcccatttgctgctgcttggctggacccttggaggggcatctgcacctccttctagcgacccccccatgcagccagctctagggcccctgagccggtagagggactctgatgatggggtccccctcgaacaacccggagagtccttagcatcaccaggctcccacggctctaactgtcgacggaccagtgcccccagcaaaggggtccaggcatctggacgggaaacaggccaggctgggaggcgtgggaaaggccccctcagggagaaggtgccctctggggtgggcccgggtgtagggtggggccccaggcaggtggcacctcctgcccacacccacaggccacggcgtggacaagcacctccacatccgcagacttcaacagcaggtcccgcagagggctgtaatagtcagaagaaaacacgtggtcttccgtgtataccacgttcagccgcagggagcccaggtcgtctggctttaggctcttgctaccattgtcccggggctggaggaagtacctgggtgggagggacacatggaggggaggcatgaggctgcatctgccaaggagcagctctcagggaagcccagctgcctgcttgaggtcgactggtcaggagggtgatcctgtaggacccctcagagtgcagcccctggggactccccaccgaagacccccagcagggctggtcaccggggatccccaggaggcaagtgttggagccaaaggcgcaggagtcaaggggggaaacgcggagggggatgggggtggaacgtggcaggaacgggtttccgggaaccggcacagaagtggtcagtgacccgccctaagacccacacccagcagtgtcagcagcaggtggaaatgaaaattatctcaaccaaagtgtgccgtggctcccgatgtcacggggtgggggccttgggctagtgagcctggcaggccacctgggcacctggtcattgtaagagacgttttctgcccggacattcttccatctttggttctaccccacgcagtcacccaggagccctcttctgctctcatttgtgggccaggcagtctaagctctcaggtgggtggagcctgtgtccgaggccccgcccccatcaggtgggtggagcctgtatccaaggcattagcccccgtcaggtgggtggagcctgtctgcagcattagcagcccggtcaggttggtggagcccgtgtccgagacattagcacccctgtcaggtaggtggagcctgtgtccgaggcattagatcccccctcagatggatagagcctgtgcctgaggcattagcccccgccaggtgggtggagcctgtgtctgagacattggcgcccccgtcaggtgggtggagcctgtgtccgaggcattagcccccctcaggtgggtggagcctgtgtccgaggcattagcagccctgtcaggtgggtggagcctgtgtccgaggcattagcccccctcaggtgggtggagcctgtgtccgaggcattagcagccctgtcaggtgggtggagcctgtgtccgaggcattagcccccgccaggtgggtggagcctgtgtccgaggcattagcccccgccaggtgggtggagcctgtgtccgaggcattagcagccctgtcaggtgggtggagcctgtgtccgaggcattagcccccctcaggtgggtggagcctgtgtccgaggcattagcccccctcaggtgggtggagcctgtgtccgaggcattagcagccctgtcaggtgggtggagcctgtgtccgaggcattagcccccgccaggtgggtggagcctgtgtccgaggcattagcagccctgtcaggtgggtggagcctgtgtccgaggcattagcaaccccggtcaggtgggtggagcctgtgtctgaggcattagccgccccccatcgccccaggtaggtagagcctgtgtgcgaggcattagcaccctggggctctctggggtatgtggtggctgccttggctaccagggccagggattcattcagcataggaggaagcctaactcagctcagggggcctgtgcccgtgccgtcttcgtagaatcaaaagacacgcgtgtttcacggtttctgggatggaaacctgccctcacacatggcagagggacacatggggtgcgaggccccggcacacagtccacgcctgggagtgcacgcttcccgtgactccgggccctctcaggagctgcctgtcgctaagggacacacatgaactggagataaaatgaaacaatggcctgttccttccaccaaaacaccaagcacctggagacaacaggaaagaaaggcaggaggcagcaacacacaacatgtcctggggtgggttctgggtcagagccgaccactgaggtctagacgtgcagaggggagtagagaaccctgtaatgcgccctcaacaggaggtgctgccgagggcccagaacaagacccggagcgcagccgcggcgcagccctgctgtgtgcgcattctgggctcctgcaccggctgctgatgccctcccctactggtgtcagacctcacgagctgctcgcggctcagggccccgctttcacccaggatcagaccccacgagctgctcacagctcagggtcccactttcgcccaggatcagaccctgcgagctgctcgcggctcagggtcccactttcacccaggatcagaccccgtgagctgctcgtggcttagggccgctttcacccacgttccctgtcttgttttgaggtgccagccattgtgagtccctgctcagtgtgatccctgctgcctctcctcacctgccatttctcacctgctgtggggcagaaactcatcaagccagagctcgtcagagctacatgcaaagtaagagcaggtgggtgctgggcacagccgaggaccagcacatgtggcctctgtgcctttccactcagaggcagcacgtgtttttgtggctctcagagatgcggaagtctgcaggtgcaacatcatcttaccacgcctcgtaggagctggactgccgcaggactttcaacgggatccttagttctcccaggaattcatctccaaacttcaggttactggcattccagaggtcaactctgaaaaacagcatcaggacagctctagctgacggcgggcagcccgtgtggagcaaagatgacaggccacgctttgttcccccaggagcagaatggagcctgcagcgcctcccagagtctccatcaaggctcagcccacagggcacgtttcaaacacgtcagaccagcctgtggctttggaataaagatgagtgtctcccagtggtaatgggcaggcagaggaaggcggaaggccatgggcccggactcagacccaggctcttagataggagggagcctgggcatcgctgcgtgcacccagaagctacatgaccccaggctcttacataggagggagcctgggcgtcgctgcgtgcacccaggagctacatgaccccaggctctgtgccaggagggagccaggcgtcgctctgtgccaggagggagccaggagttgctgtgtgcacccaggagctatgtggctgctgccactctcagctccagcaccatctgtcccctttgcccacaacaggcccagcaccagcagtctgtgcacggcgggcaaatgtagaaccctgtctccatggattgctcatgatctaggggcacaaagtggattcaggggccatgcacaccacagcggggggagaactgtggccacaaaccacagcacggtccacgaatctccgtgactaccgcaggcccagcattgtgaagcttctgctcatgtctaacacagcagcggctcccactaatgttctgtcctagtgtgggatggtacgtgtcccctcagacctggggctgtgaaattctgacagacatacagcatccccggctgcaacaagtctacagggctggtaacccagtccctcatggccaggacccactcataggcctgaaacacctgaagtcatgcgtggccagccctacccacgggcctgaaaccacacagttacacgtggccagccctacccagggggctaaaactcggcaggcctaaccacactgtgggcatcaggggcatccccctggagggagaagattccagaaggctggggattttgttacccttgcgaatcctgcagggaagtggcaccacagaggcactggcatctgggccggggagggctgacaggctgcacaggaacccacagcgcgttcctttcagaaggaacatgaggggaccgctgatctgcccatggacactttaaaaaaatgtgctgagtggccaggcaggcgcatttgcctttaataagggaaatatttaaaacatgttttgtgtgcttttaaaaaatttaataactaggacttcactcctgaattcaaaacttggtgtaaaaagaaaccaacaatggcgcttccttctcttgaaaaaggggctggtgtgagtccctggggaggcagatctgaccgaccacgtcagggacattctatggttcaggaccctgacccctcaggaggtggatctgactgaccacgtcagggacattctatggttcaggatggagacaactatgggggacggatctgaccgataacatcagggacattcctacagttctcaaccacaaaaccacgcctcccagcagccgtagggcctgagccacgcaccggctccacgtgtcccattaagggtccccccagggcagtgttagcccctgggagggagggtgaccagggatttgatggccagcacattctccaaaatgacctaaagaaagcaggtgcatcccaggctcagggacatcccaggctcggggacatcccaggctcggggaacatcccaggctcggggaacatcccaggcttgggggcatcccaggctcagggaacatcccaggctcgggggcatcccaggctcgggggcatcctaggctcggggtctcagggccggctggggagggtcaggagggagccgtttccttccttctctgtccagcatgggaagattcgggggcttcaggggaggctcatctgcctcttcatagggaatggaggcattcgttggtacagaaggaacagaggctacgttcaaaaataaacaggaatccagcttattttcactgggaggagggaacccgccggggtttgtgaagggcacattctgacgcctgccctccccagaactctgagtcagcgggatcgtggggctctctaaatcctgggcctgagatcgcgtcctgacctgcgtgaacccacaagcgatttccccgtttcccgtgggaggcgttgaggagccaggaaagggcggtgggggctccatgggcaaaggctgaagatgcagcttctatgaccatacacaggaaacatgaacccaggacgccaggtgagagtgtttcactcgagtcaaaggggacagggtctccacagaggccacccagccgagagtttcagcagtgccagtgggtcctgctcggtcagggccaggcgtcgtgctgacccgccaggccctgcgacctctgagtgaggcctgaacccatggaaggcggagggcttagaacaagaccttaagaacggctgcagcccccgtcactccaggtggatgaagccttacggccagagggatgcggacctctggctttcgcctcttcgcaggtattgcaaggtgagccctaacaccacccacaggctgtcacttcaactacaacttctaacatcctgttgtgaaaattaccaagaaaatggaaattcatttctatctatgaccctatatttagtaacaaagaacaaaagagctgaggagtttgggtgaaaactgccaagttggggacgcggagcctggttttctcacctgatttcgagcttgtccacgtcttcctcctcaaagtcaaagtgggacttcttgctgtagctacagggccgggtcacctggagtcagacgagagagaaagcgctgagaccgcggtgccaccaggcgggggtatatgcggacctaggccccgggctgccctaccctctgcgcttacccacacaccactcaagggccacaaccaggaaggcgccaggcgggattcgggattcaggcctggcttcctgagtgccagcatttcctactcacggcgcccctggaggggcagacccaggtgagacctgccccaaggctgttcacggccacggccggactctcccagtggctcctgatgggtgccgggctctgggtacctaaatgtccgtcacctgcgcctgctctgggcctgccaccccgtgagggagggagggtcccctctgccgtggagacgaagccagcgccgccctcccgtggccccacctcaaggctctatttgccaacaggaagtgaaacgcgtgaggtctgtggagcctgaacctggccggccccgaacaggccccagcactccagggagggtcagacggtggaaagtcaagacgctgctaccttcctcctgacacctccgcaccgtgggttccttagaacagaaacggagtgaaggcgtgaagggtcgaggctccgggaccgccccccgccagccagcagggcccttgcagcagagcaggaggccgacccacaggctccaggagacagtggttatcacctggagttccgatttaaccaccatcagccgtgcaccaggtcacctgcgtttacaagaagggctccgtcctgcccggcctccctccctgcccccccttctccgggcctcagcagtgatgctggctcaggagctctcagctcgaagttctgatgtaaggcttgacaccaaaatcatgttgctaaaactgcctaacctctgagcttgcacttcctgattggtaaactgaggtgaagatcacgcaggggcagttctctgcttcgggttgagggctgctgacgcctcctccttcctgacctacacaccactgtccaaaaatttgcttccccccaacttccccatctcacaaaactcaggtcaggcaatgcctcctccaggaagcccccagtgcccctgcctcatgccctctctgcagggcaggtcaggcaatgcctcctccaggaagcccccagtgcccctgcctcacgccctctctgcagggcaggtcgggagctattgtaggggcttgtctgtttgcatccctcccatgctggcctggtgtggtggccttggactcctctgttttctgccacatcttatcaccagctgatcaccagcacggtgctggcacctgacacgtgttgagtgaatgaaggcagctcctaccaaatttatgagattatttaatctcatttagagagttaaagggtcttaatgtgtctagttgttatcctggaagaaaatggtacagacgctgcttcccatagaaacggaacatctgttttcctgggtctgctcccagtaggtggctgtctgaccacagcccgcgggggatgtgctccctccccggggctcagcctccagctgggtcagaagcagctgaagccgaaagagacagagtcctggtgaaagaggtctgctaaggaaggggaggagacggagtgaaaggtcacagagcccaaagagcagggccccgcgcgtcccacacagcagcggtcagcgaggtccgggccttccctggagccccacaggtggtgacgcagaccatggttttcagactgtctgtggtcactaaattgctcctgtaggctgagacccacgtctttacagagtgaaacaggagtgcacacagtagaaacagcatgagaacactgcaagcgtgatgagcacccgtgtgtggccgggcagtgggcgagctctaccccactgtgtgtatgacagctctgtgtgtggcagccaagccagcagccgaggcggggggagctgccacctggaactcggtccatgctgcatgcctcctgcacctccaacagggcccaccctccccctgggagcctggcagctccctgccttccctcgctctggcaaaaccatcttctccgcctgtctataagtgaggcttccgtttgagacagagaacagattccacctctaaagccctcctcacagtggccctgaaagcctggccctggctttggacaccaagttcccacctctgcctgtggggccctttcgagcctcagcagtgccagtgggtcctactcagtcaggacccactgaccggtaggtccactctcctacggtcccctgagagctgcatgcatcgagccccactcagccatcatggctcaggggagcccgcccgacccctcagatgtgactggccatgctcttgccacagaggcctcatccatcctcacatctccagggcctgtgcaccggaatgtttgtggatgggaagaacatctgcctaaaggccctgcacacagctgtccccaaaccgcaccggccacatggcaggtcctcactccacgagatgcagccatcccaaacggggtcacattccaccaggtgcacccttgcaccctccttttcatggattttggtgcttcatgttctgagaggatctctgtgtctgaatcctttcccctttgtttcaaaaccctgcctatttccactggaacaagccttccgcctctcagggatgcttgggcagagcagccaaaaaaacaaaaacccccaaggtcctggtaatttggaaagcattaatctgtcatcttttaactcaaatctgggccagttcgggagacaacgaatgacctttctctcttgggagaggagggaaggtcctgtggccacgggtccaatccccagggctggctggctgggctcgctcctctccggaaggaacccagggccggccggcggggctcgctcctctccggaaggaacccagggccggctggcggggctcgctcctctccggaaggaacttccagagggaagagactgagatcattctggatccagactttctgccaacgtgtctcgggtgcagagtttccacttaacgttgacccatgaagataccaacctcaaaataaaacacttcatcgaactggggattgttggtcttcctcttcactttcgtcttctttgcttctgatctgttatcaagtgagaaaggattgggattaaaacaacactgctgattccaagtctctcagtggtaaaaccgagctctcaaatgcacaagtcacttattggctttatttattttataaatatttctgctggtctccaactccagatggtatgcaaatcaggaacctttactcagccaaaaatacccagcgtgaagagcatgaaggcttcattttctacaaagcaattttggagcaataaagaaaacaaaaggaagtaaaaattcacattctacctcaaagcgcaacctcctgactcctcccaaatgaggcagtggtctcgtgatttcagagctggaccctagccccccaggaccagaacagaaacctgaagcgtgaggcaacttgcctgaagggtcctgccagcgtcacggtggcgtaggggtcacattgcccattcacgatggggaggccctggcactcgacgatgctgaggagagaagcagaggcggcgtcaggagggagcgcagacacctgggcgaatggcgagacagctctgggtcaggcaggaggcctgagttcaagctgtgagatgaggtttcctcaccggaaggcagggagggccacaccagccattctgcctcggtgtgacgctgaatcacgctggccattcacaaaagcccaaaacaacacctctaaggtgagcatgtgctttagcgtggacgccagcagtgtgtgacagcacatctaaagcagcgtcatcgggggggcggggggcaggacccctaaaacagtgtcatcctgggggccaggacccctaaaacagcatcatctgggagccaggacccctaaaacagtgtcatctgggagccaggatctctaaaacagcgtcatcctgggggccaggacccctaaaacagtgtcatcctgggggccagggcccctaaaacagcatcatctgggagctaagacctctaaaacagcatcatcctgggggccaggacccctaaaacagcgtcatctgggagccaggacccctaaaacagtgtcatctgggagccaggacctctaaaacagcgtcatcctgggggcccagaacctctaaaacagcgtcatcctggaagggggccagaacttctaaaacagcatcatcctggggcaacctctaaaacggcatcatcctgggggccaggacctctaaaacagcatcatcctggggccaggacctctaaaacagtgtcatcctggggccaggacctctaaaacggcatcatcctggggccaggacctctaaaacggcatcatcctggggccaggacctctaaaacagtgtcatcctggggccaggacctctaaaacggcgtcatcctggggccaggacctctaaaacggcatcatcctgggggccaggacctctaaaacggcatcatcctggggccaggacctctaaaacagtgtcatcctggggccaggacctctaaaacggcatcatcctggggccaggacctctaaaacggcatcatcctggggccaggacctctaaaacggcatcatcctggggccaggacctctaaaacggcatcatcctggaggccaggacctctaaaacggcatcatcctggggccaggacctctaaaacggcatcatcctgggggccaggacctctaaaacggcatcatcctggggccaggacctctaaaacgacgtcatcctgggggccaggacctctaaaacagcttcatcctggtgggccaggacctctaaaacggcgtcatcctgggggccaggacctctaaaacggcatcatcctggggccaggacctctaaaacggcatcatcctggggccaggacctctaaaacggcatcatcctgggggccaggacctctaaaacggcatcatcctggggccaggacctctaaaacggcatcatcctggggccaggacctctaaaacgacgtcatcctgggggccaggacctctaaaacggcatcatcctgggggccaggacctctaaaacggcgtcatcctgggggccaggacctctaaaacggcgtcatcctgggggccaggacctctaaaacggcgtcatcctgggggccaggacctctaaaacagcatcatcctggtgggccaggacctctaaaacggcgtcatcctgggggccaggacctctaaaatggcgtcatcctggtgggccaggacccctaaaacagcatcatcctggtgggccaggacctctaaacagtgtcatcctgggcagccaccggctctggaaattcttgtgcgttggtgtgaaaacccctgtgtgctcctcgggagccagacatgccactcgctgtgcgctcggtctctagtgaggacgtgtcttaccgtgtggcgagcttgtggcagacgaccccagtgtctgtgatgacctcgctcagccgcagctccaggtgcactttgccctgcaaggcacaaggatggggtgtcagaggctgtggcgctgctcccacaggccactagggccgcgcgcccagggaaagcctagagggcaaagggagcaggcggccccgccctgccctggccaatgggcacgtccagcccctccactccacccccgggacgcagggtcccagctgtggcctttctccaggagagctgcttgcctgactgctcagccccatgtggctgcccaggctcctggctctgctgagagcaggtcgctgcctcagaagtgaggggtccaaccgtgtaggagacggtcattcagtgaagcagacccccaaaggctctgatgctgcaggctgctcgtgtgtccgtcgggacaaaccagaggggaagcacagctgtctcccaagcaggggccactgcctttacctcccctcgggcgaggccggatggaggcccgcaggaacctcggagagctcacacagagggcaaggctcacacagagggcaagactcacacaggaggcaagactcacgcagagagcaagactcacacagagggcaaggctcacacagagggcaaggctcacacagagggcaaggctcacacagagggcaagactcacacagagggcaagactcacacagagagcaagactcacacagagggcaagactcacacagacagcaaggctcacgggggcttctagcagagcagacagcaaggctgccctgcgggtccacctgtctctctagatcagtctgtctgtgtgtgctgctgtgtccatccacctgtctgtctgtgtgcacggctgtgggtgtgtgtccacctgtctgtgcgtacaactgtgtgtctgcctgtgtgcgtgcggtttgtgtgtgcagctgtgtatgtgagcatgctgctgtgtgtgcatgtccacctgtatgtgtgtccgcctgtgtctgtgcatctggctgtgtgtgtgcagctgtgtgtcctcctgtgtgtgcggctgtgtgtctacctgtgtgcgtgcaactgtgtgtgtctatgtgtgtctgcctatgcatgcatgcgactatgtgtgtccatctgtgctgctgtgtgcgtgtctgcctgtgtagctgtgtgtccgcctgtgtgtgcggctgtgtgtctgcctgtgtgcgtgcaactgtgtgtccatctgtgtgtggctgtgtccacctgtgtgcatgcgactgtgtgtctacctgtgtgtgcatgtgattgtgtgtatctgcttgtatgtgtccacctgtgtgcatgttcgcctgtgtgtgcatgcagctgtgtgtgtctgcctgtctgtgcatgtggctatgtgtctgtgtgggcgtgcgattgtgtgtgcgtgtccgtctgtgtgcacacggctgtgtgtctgcctgtgtttgcatgaaactgtgtgtgtctgcctgtcggtgtctgcctgtctgtatgtgcatctgcctgtctgtgtgtttggctgtgtgtgtccttctgtgtgtgtgtgcgactatgtgtgcatgtctgtctgtgtgcaagcagctgtgtgtgcatctgcctgtatgtgcatgcaactctgtgtgtgtctacctgtctgtagtgtgtggctgtgtgcatgtccttctgtgtgtgtgcgcgactgtgtctgcctgtctgtgcgcgtggctgtgtgtccacctgtgtatgtgtgtttgtccgcctgtctgtacatgcgactgtgtgtgcatgtctgcctgtgtgtgcaccgcctgtgtgtatgtgtgactgtgtccacctgtgtgtgtgtgcggctatgtgtgcctacctgtgtgtgccgctgtccctgtatttgctccagcctgaatggcaatgaatggatgggataaacacagactcatccatgcttcaggggctctgcctggcccggcccttagctctagctcctgaggctccgggaaggccaaggcgtgttccccagggcttgtccctgcctgtgggagggtgggacagacgggcagaatgcctggcgctaagacgtggacggcagaaccgacagcagccctgcagcacgtggcctggtgcagaacctcggatggagcagggacctcgcttaggccccacccacctaaatgattaaaaaaccttcgagttccttcaaaaatatatcagacacctagccagccttgagtggtaaatcacctaacaagcaaaataaataataaaataatagccaaaaaattagtcaggagatatttattccctatacaagttaaaaatagcatcttaacatatgtccctaaattgtttttcaaaaaccgagaccctcaccaaacagatctaccaacacagaccacaaatgcaggggggatcacaggcccgaaccctgaacccggctctattctgaatttcttcctcaggggccaggaggggtcatgcctgtgggccagagccaacattcttttctgctgatctcaattgtttggacaaagcttctcctccttaaccaatcacaaatcaaaaacgctctatatccgacccatgggccacacgtcgtgatgtctgccttctcaggtcaaactgacatacggcctccatgtactgatttatgactttgccacaacctcagcctccccaccttctgaaacccttgcctgtgaaccctcggggtgcctgggtcgtgggcgcagcctgccctgccagggtgcacaccccgaagcccctggtcagggagtggaacataaagcccttcagccctcacttgacaccgcgtcggtgcagccccacggcacccccacacttgatactatgccccacggcacccccacacttggcaccacgttccacggcacccccacactgacaacacgtcccacggcacccctacacttgacaccacgttccatggcacccccacactgacaccacgccccacggcacccccacactgacaccacgccccacggcacccccacactgacaccacgccccacggcacccccacacttgataccacgttccacggcacccccacactgacaccacaccccacagcacccccacacttgataccatgccccacagcacccccacacttgacaccacgttccacggcacccccacactgacaccacaccccaaagcacccccacacttgataccatgttccacggcacccccacacttgataccacgttccacggcacccccacactgacaccacaccccacagcacccccacacttgataccatgccccacagcacccccacacttgacaccacgttccacggaacccccgcactgacaccacaccccacggcacccccacactgacaccacgccccacggcacccccacactgacaccacgccccacagcacccccacacttgacaccacgttccacggcacccccacacttgacaccacgttccatggcacccccacactgacaacacgccccacggcacccccacacttgataccacgttccacggcacccccacactgacaccacaccccacagcacccctacacttgacaccacgttccatggcacccccacacttcataccatgttccacggcacccccacactgacaccacgccccacggcacccccacactgacaccacgccccacggcacccccacactgacaccacgccccacggcacccccacactgacaccacgccccacggcacccccgcactgacaccacgttccacggcaccccacacttcataccacgttccacggcacccccacacttgacaccacgccccacggaacccccacacttgacaccacgttccacggcacccccacactgacaccacgccccacggcacccccacacttgacccagcgctcacagggggaatggaactgggtctgtgctgcccaggcaggtgtgggaggtggggcctccgctgctgtcctgagactctggggtctggaggttgggtgtggccttcccgccctgtggctgcagccccagagcaggtcctgaggggccacaaggatgttgggccgggaaggtgggcatgaaccccacgccagcactgtgggcggggaaaacaggtgcctaaaatgacaacaaagaccccaccaagaccacagctcctcttcccacacccatcagagctcagggctgagcggagtatcgcctgtggtcctcaccgcctggcagcgggcctgctatccgtggctatccatgggctaaaggagtgccctgaacaccagccgggcagtgggcctgctatccgtggctatccacgggctaaaggagtgccctgaacaccagccgggcactgggcctgctatccgtggctatccacgggctaaaggagtggcctgaccaccaaagacaggagaaagtgcctgacccaagaataaccaagaatccccactgcttcatccccgttctcaaatgccgggcgcaaactctctcaggacagaagcgttcagatttgcaaggctgtgcagacggaggtagctctattcacattcgggagcttcaggaagagtcacgactgcatgtggggggtcctggtccccagcagcaggctgtgtggcccccgtgtgctctcccggcccctggcagcaggctgtgcggcccccgtgtgctctcccggctcctggccgggtccaggggcacctggctggtcaccatcaggtcctgaggctgctcctgttcctgcagcatgaatccctcctgaccagctgacttgtgtgctttcgtcttctgctgattcaggagtgggaacaaacaaaacccacccctggaaggccctttctcctgccagaaaagccaatgagtaaatctgcaggtgctggcgcaggctggagaatcccagacatttagaggttaaacaacacagttctaaataacacacagatcagagaacgcaagacaaattttaaaatgttccggaataaacagaaatgaaagtgttactcatcaaaatcagtgggatgaagcgggagccgtgctcggggtggaggggaatctggagtgccggccacacagactagagcagaagggagatctgaacgctgacctgagcttagagcagaagggagatctgaacgctgacctgagcttagagcagaagggagatctgaacgctgacctgagcttagagcagaagggagagctgaacgctgacctgagcttagagcagaagggagatctgaacgctgacctgagcttagagcagaagggagatctgaacgctgacctgagcttagagctgggagactgagaaaaatgagtaaactaaacccagagcccaagaacagaaaacagaagtcagatcggaaaccaataggtaaaaatcaaagccaacggcaaattccttgagagatcaataaaattaataaacctcaaaccaggctactaagagcaaaagggaaaaggcacaaattcccacaggaaaggaacgagaggacctggctgccgaccctggcacctgcctggacgctgcactgaggtccctggcgctgcactcctgcgaactcacagacgcagcaaaggggccccagcgtccagctcctgacaacgtgtggctgcagtgtcacccatggggccctgggcgggggctgctgaggggtgtatggaaactctgtactctgctcaatttccctgtgaacacagaactgcccccaaaacagagttaattaatttttaaaaagcagccaatggtccctatccatctttctcaggaaggccttccccagggagagagcagcgcgcagagccgggtcagggtcctggccccacccaccggttgccgtgtcccccactgagcgggcagcggcccagagagcagccaggacagaggtgccttggatgcaggactgttccacgccggccgcagagaggagacgaagtccgcgggcagatgagacaggatgcagaggccatgaggaaggaagcccagcctcggccgtctcctcttacaaccctggagagatgtgaaagcttgacgacggacggtgactttgtttgctccgaaaatccttccaagaggactgtctgctgcacaaacacaaaattcccagaggctgtagcaggaggctggaatttccagcccagtgagatttcacggtgcaactggaaggctccaagggggaaacacgtaggtgtctcttgggcggatggcagacccaggggtttgctgtgatcccctgcagggctgtgctattttctgaatacgtcacagatgcacttgaaagcctggtttataaacggagctcagtgacccccaggcgcccagatcaccgcggatgcctcgctgtcacaggcggtgccctcgctggcatctgacgctggcatctcccccactggcatctgacgctggcgtctcccccgctggccctgcatcaggggagggtcagagagcacaactctgcataataaagtgatttaacaaagactttccaacagtggccgttccagaaggaagcaagaaaggtttaattgtgtttcccccatttctgtgactcacttgctggcctcccccatgggctgcttctgtgacactcgctgtccggacacaggactgttcctgggaatcacagagcggagggactcatggagccacatggctaccccctgccttcctgaaaatggtcactgtgacatcttatgatgaaacggcggctcctgagactggagttgtggggttttttttcttcttcttcttctttttttgagatggagtttcactcttgttgcccaggctggagtgcaatggcgcgatctcagctcacagcaacctccgcctcccgggttcaagcgattctcctgcctcaacctccggagtagctgggattacaggcatgcgccaccacgcccggctaattttgtattttcagtagagacggggtttcaccatgttggtcaggctggtctcaaacacctgacctcaggtgatccacccgcctcggcctcccaaagtgctggaattacaagcatgagccaccgcgcccagcctggagttgaggttttaaaggttggctggagtccagcagggccactgctccctgtcacgctacgttttgggcggcgttggggctgactgcatcagtgaagcaacgcattggagagcagcgggcattggagagcaatgaccttgcctcctcccttttagacaacagctcgcatttgccttccataaagtgcaaattcccgggagactgacaccactcggttcaggatcctcatgttccggacagtgagagtcaggcttggaggacgctgggcttggccacgggtacgcagcctcgggcgttaattatgagattccaccagctgtgagatcaacctgcggcattcttatttacagctttgtggagatgcaacgtctgagtcctgatcgtcatggtggttacactatctaccctgtgatgaagttgcaccgactgtcacaacagcccatcggcaggtgactggagcaacagcacacgcttcgcacctcggaccattcctcagccttggaaggaaggaggttctgataccacaagcgacccggaggatgtcacgcagagcgacattagcctcagaaagaccagcagggtagagctcactcccatgagccacggggagtggcctgcgtcagagacagagtgccatggggctgccggtggggaaggggcggacgggagcgtgtgaataaaactctagccaggggacagaggggacggaggttccgttttgcaagatgaaaggagctctagagatgggtggtggtgacggttatacaatattatgaatatattcaatgctataccactgaattggacattttaaatggttaaaatggtaaatttcatgtctctgttttaccacataaaaaactggaaaaaatagcatagaatacacagagagacacacacagaaacacgtgcctgtgaactggtgaaatctggataacatccgtggactgcacaaacgtcggcgtcctggttgacgttgcaccagctgcgcatggcagtgcctggggaagccgggagaagggagcacagccttctgtttggggaagccaggagaagggagcacggccgtccgttcgggggagccgggagaagggagcacggccttccgttcgggggagccgggagaagggagcacggccttccgttttcagggaaaggtgggaattcgcccctcgccactcctgtgtactgttttgatgccttcctatagatctataaccatttcaaaattaaatcagtaaaaaaaaaaaaaaggcaagaaagaggaaaagctacacctgccaataaaaccaaacttgaatccgaggcaaacgacgaggccgcactctgccagctgctcagaggccgttgtgacggagaccccagcgacggcgggtatcccagaatagaagagctggggaactcgccgacacgcaggcgggagcggcccagtcaccaagccccgtctcccgggcagcacgtgggaaaccccgcctttctgccgggacgccaaggtccgtgggagcagcacgctggggcccttgtgctccggggatgcgaggacagtcattagttctgcagtaatcacagcgtccttcactttccacagcacgtgtgggttccccagccagtgctttcccaggaagcagagttaattaagtgtgacgcacaattagcacaggtcccttggggcagggccatccccagggcttcttggctccactccttaatttccgtcaagggcctcaccccacccccacagctgggctcatggtcaacttcatgaatgaaccctttgctggccatgggcgtgtgcacagctcatgaccttggcaaatggcaaccttgacccagtgaagcgcagaggatgagggttgccagggcaagacggttcccagaggacgagggttcccagaggacgagggttcccgagggatgagggttccaggaggatgagggttgccgggggacaagggttcccagaggacaccaggccatccagtcccccagcccaaatttgccctgaacttgcgggcacagagcctccatccgacccacccagttgcctctgctgaagtctcaggcgaagtcctcacaaggaacctattttggggatttgtccaggatgccagcctccaggtgtaaaaataaccatcacagccaccaatttacgatgcgccaggtgccttcgagtggcacacacgccataccagcacgcttcacaaacccacccagatgggaaaactgaggcctgcaaaggacgttggcaacaatccgatgagggagctggctccgagcctggcggcctgtgctgggactctgcactcagacacacactgtggtaccagctgaggacccaggaagccctcccacatcccagggccgctgtgctgcaaccccatactcagacactcaccctcctacgtcccagggccgctgtgcagcaacactacactcagacactcactgcggtcccagctgaggacccaggaagccctcctgtgtcccagggacgctgtgcagcaaccctacactcagacactcactgcggtcccaactgaggacccaggaagccctcccgcgtcccaagggcgctgtgccacaaccctacactcagacgctcactgcggtcccagctgaggacccaggaagccgtccggtgtcccagggaccctgtgccgcaaccctacactcagacacttactgtggtcccagctgaggacccacttgggaaaccctcccacgtcccagggttgggccacggtgcctcttgcttgtggcctttgcagctgctctgtgtcacagaccagggctcagggtgaccccacaggagctggtgcaggcttgggctccggtggactgacccccactgctccctctgttacaggcaagcctggagcagctgttgccgggcagctgggcaccgtgcgtccgtgagcagctgtgaacacaagggtctgggacatgggccccagcactggagcccccggtcttgcgtggggaggtgggacaagctccccccactggacaggaccggggtgagccccagtcagcacacagtcccggcaagccagggtgagcccctggccactttcgacaatggacacgggagaccagaacgctctttcagctcagacccttcttggtgccgcgtgccaggcaacagcccgcccagccaaccgtggggaagtgagggtccctgagggctgaccctggctcggcccttccccacccatgttttctcttgggcctcaatgacgcgtgcctgtcctttcccaccgtgtttgttttcacagcttcctcagttgtgcatgacaaagggcggcagtaggcaaagggaaaacccaaaatccatgcacggagcccaggctcactccgagcacaagtgggcgaacagacacaatgcaaaatccatgacagagcctgcgctcactccgaccacaagcgggtgaacacgcccaacccaaaatccatggcagagaccgcgctcactccgagcacaagcgggcgaacacgcacaacccaaaatccatggcagagaccgcgctcactccgagcacaagcgggcgaacacgcacaacccaaaatccatggcagagaccgcgctcactccgagcacaagcgggcgaacacgcacaacccaaaatccatggcagagaccgcgctcactccgagcacaagcgggcgaacacgcacaacccaaaatccatggcggagcccgcgctcactccgagcacaagcgggcgaacacgcacaacccaaaatccatggcggagcccgcgctcactccgagcacaagcgggcgaacacgcacaacccaaaatccatggcagagcctgcgctcactccgagcacaagcaggcaaacacgcacaacccaaaatccacacgcggagcccgcgctcactccgagcacaagcgggcgaacatgcacaacccaaaatccatggcagagcctgcgctcactccgagcacaagcaggcgaacacgcacaacccaaaatccatggcggagcccgcgctcactccgagcacaagtgggcgaacacgcaatctgctcatcgttattcccagtcaaggccgaagcccgatctacgtctttagccacagtcggagccgggcccgtctcgaagccccatggtgtcccagggctctggtttccggggctgcgccgagagtctcacctgcacttccgagtcagcgtccacgtgctgcagctggaaccaggtgtccctgttgtggtacttctgcaagtcctccttctggatggccaccttccctgcaacacaagcagagaagacttcaccacgggcacaggccccagagccaggacgcctgtgagcagaagccagcccatcatcaccgcagcttatttccaacagtttaattcagaatggggcaccggccgggtgcggggctcatgcctggaacccccacgcttgggaggcccaggggggagggtcgcttgagaccagcctgagcgatatggtgaaaacttgtctctacaaaaaataaaggaatgagccgggcatggtggcactgtatctctaaaaattgatattaaaaagtcaaaataatcaggtgcagcggtaagtctccactgtgtcccttccagtaaggcgttccagaggcttcgctgtgaaggcgcgaacgtccgctccatcggcaatgtgcgcctcactttcactgtggtccgtggccagttctcacagcaggaggtgcctcggagctggctgcaccagagctctgatctcacaaatgaacaccccgtgcctcacacaccaccaaggcagcagcatcacgccacaagagacacgtgtgcacccgtgcgagcgacagcctgaaacacacgtgtgcctagggtgctttccgtgtgtgtggacacgcacgtgtgtgcatgcatgtgggtgctcaggttattcacaggcaggactgagagccagaatgagctgccaccttcccacgcgacgtgggttggtctgaatctgtgcctctaaagtgtaatgaatgagccgccttctgggacccctggagagcctgaaagtgtagattcctggccttctccagacggaggagaacagaggctctggtgtgggctggaatctgcaccaccacaggtccctgggcacttgtgtgggccccaaagtctgggaacgtccactctaaacagtttcccgtgccttaaacaggcttagtactttggggctacgcttccagtgaaaatacgtatcagaatatatttgtacaatatacgtttacctagtatggatttatatgtgtaaattcgcatctgcaaccattattatctgcttatacgttcacctcattccagaaacattcccgaggcgcggcaaacgtgtgcccatcccatccccggcaggacagggcttgtcaggcgctgggcaccgagccatctcccatcctgcgtcccttcatggcaccaccatgtcaaccctgccagtggcctccgcacactgcggaccacgccacccaccacggtgagcacccacggcagcacatgcacctctgttgaccgatgcacgtgaactcctagggagtcgcacacacatgtgaagtctgagcccatcacagagcacacacgagagcaggagtgaggaaggaaatgttggcagactcctcacgtcttcgttctgcacccagagacacacacgccctccttaaggatcttggtccagtcactgaagtgagaaactctgggtccccgcagacccggttcaccgcagcgtccgcagccacagggtctgagcacattgtgcatgacctgggctcccgggagcggcctgggcctcctacccggccaccctgcctcacgccaggacagcgcagcccagccccggttctctcttccaaggaagatccttttatatttccgtgtctcaaaaaacttccgcaggctcccatcggaacaaccctggcctggcatccagcagccacatgcttgggcctgattctctgtccagcctcagtaaattcgggaacactccactgccagcctctcacaggtgccatctcagtcggtcctgcggtgaccctggaggagcaggtaccactctgcacaccccacagacgagcaggccggggctgcagggagagggagcttccgtccctgccttcctgccagcgttccttcctatgttggcgtccccaccctgcgaggtcccaggacgcatcttccctcaggagctcctctgcctcgcgggctcatgcgagcgagacctctcagcctgactggtccattccgtgactaatctcagagcccgtgggcctgggccaccaggcccctcctttgtctgcaaactcagagggtctgagacacgcccagctcagcaccagctccagaccctatgggacagcgcaaggtcggccacatgatggagcaccacatggccacaggacatggtgggaggtgcggaaggtggaaagaggcacaaagacgctttccaagtgcccaaaggagagagacggaatcaggacagtttgcctccagtgctgctgacacctgccatgcacgtcagcatcttcatctgatgtcctcaggggagccggctgcacctcacaccatccactctgcaaagcaaagcagccctgggaacagccctggaaaaagccccttcccagctccgggacccccgctcacagccagggccggccagttccacagctacccggacgtagatacagcacacaggcactcatgggttcctaagatcagcctggtgacctcatcggctcagctcttgccacacagacatacacaggccatctggagctgcacgggacgctgaaaccaccactgagggcaggcgagagccaaatcaagaaccaagggggccggcacaggaaacaggccccagcacatgtgggagaaggaacaccagggaggctcagagagaaatccagtgacacaccacgtggactccctccaatggcctctaatggcgcagaccacgagggtggacgacagccaggacacctccgcctggcccacctcactcgctgagccccccgccccgcctcactcgctgagcccccccgccccgcctcactcgctgagcccccccgccccgcctcactctctgagcccccccgccccgcctcactcgctgagctcccccccgcctcactcgctgagcccccccgccccgcctcactcgctgagccccccccgcctcactcgctgagccccccgccccgcctcactcgctgagctcccccccccgcctcactcgctgagctccccccccgcctcactcgctgagcccccccgccccgcctcactcgctgagccccccgccccgcctcactcgctgagcccccccgccccgcctcactcgctgagccccccccgcctcactcgctgagccccccgccccgcctcactcgctgagctcccccccccgcctcactcgctgagctcccccccccgcctcactcgctgagcccccccgccccgcctcactcgctgagccccccgccccgcctcactcgctgagctccccccccgcctcactcgctgagccccccccgccccgcctcactcgctgagccccccccgccccccccgccccgcctcactcgctgagcccccccgccccccccccgccccgcctcactcgctgagctccccccccgcctcactcgctgagccccccgccccgcctcactcgctgagctcccccgccgcctcactcgctgagccccccgccctcccaccggcagccctgggcgggcgcctttgacttcaagggtccggagtgggggctctgtcctctcctctgacgaccgctgcgtggctcttgcataacctcccctttcccccacaacacgaacctcagttttgagtctcacaggaataaagccacatgaaagcaaaaacttcttaaaactgagttgggcaatatatttcagtgaaaagggataaatcttcagactccaagacgccttcagctggacaggagggtcagttttgaagtctgaagttttaaatacttgcaatgtcactgtgtcttcacatttttatgagctgaaactgggacgggagaagtcacatatttacgtggataaaaatcttgtaactggcacatgattacaagtctttaattttagaagtacttcacttaattttttaataggtaacacagaaacagaacaaaatccacaacattcaaaaggatttaaaatcccttcgagaagggatccctgcccctgccacctcattcccgacgtggggtcacttctgtcaccagcccccaacctttccttctagaagccagccacattcaacaatggggaccgtggacatttgaagcatgcgtgttcgtatctccagatgctgacctgagagaatgcctgatctaaaagccacggcgtctacttaaatttctctgatgtgcctaatccacagggttgtccccatctatttgagtcacaccgaaaagtttaccgaacactctgggcctccctttctcacttgggcaaaggcggctgccttctcaccacgagaggccggaagggtcactttcttctgctgcatctgtgctggccaggcccgttcagaaaggaggagccaggggtctggagggcatcagacgggggaccagctgcagagggaccagaaaaaggggaaacagccacaggacacaactgagcaagagctgcccgagacagggaatgcggctgaaatgcgcgcgcctccctctgaccccacctgtgtcccagccagggccacgaggaaaaaacaaaggccatacagatcccaaaggaagaaataaaagcctttattcatagaatgtacaaaaaaaaatctacaggcaaagctaatagaactaattggtgtgttcagcaagaacagagaacacaaagtcagtgtggagacgtcgactgcgtttgtacatacaagcaatgaccatgaaaattacacaaaaacagcacctttcacaaaattatgcttttaggtttgtgcttttggtggactacctcagaaatctttaaccactccactaaacacataaaacacagggaaataaatgtttttaaatgtgcaaaatgtgtaggctgaaaacacatcacaaaacactgatgagagaaattggaaagacccaagcgtgtaaagatataccatgtccatggatttgaagactcagttttgttaagatattaattctccccaaattaatctatagatcaatgtaatcccagtcaaaattcctgtgggactattttggaaattgagaagctcattcaaaagtatatatggcaattcaaagcatctagaatagaaaaacaagtttaagaacaaatttgatgatcttacactacaatgtaagacctgctatgaagctatagtgatcaagactgcgtggtattggcatgaggacaggtggatcaatatgacacacagcaggcgagccccaaattggggcttagcctcagagggtctgtagcttcactcaggaaagaattcgagaatgaggtggtggtggaagaaaacagttttatggaggcggcagtggcagctctgaaactgctcctgcacagcaggactccccacgggcggggtgttgacagtctcagccgttcctgcagagaagggttccccataggcagggtgttgagagtggcacctccgggcactgctgcagtcttatttatcctcacttttaactatatgtcaattaaaagattatgcagacatttctagaaaaagggtggtaatttccgagtcacggggttgttcctatggaaaggggtggtaacctccaggcgttgccatggcaatggtaaggtgacatggtacactggcaggcgtgtccgatggaaagctgcttccacccatccctgtctcagctagtcctcaatttggttcggtgtccgagccctgccttcagagtccagtcccgcctcctacctcagatggaagagaatacagaggccacaaacagacccacacaatgcagccaactaagctgtaaatgtgccaaagtcatcaacggaggaagggtcgtctttcagccaagggtgccggaacaaagggatgtctacatggaaaaaacagaatcccgacccttttctttgtgctataagtgaaaattagcttgaaacagatcatggaactaaatgtgaacgctgaaagcacatgctttccaggagaaaaccgccacaaccgtggaataggcaagactttcttagacatgacaccacaggtacaaatcatacaagaaaaaaatgtgataaactggaccatcgaaattaaaaacttctgttcttcaaagccaatggtaagaaaatgaaatacaagccacaaactggaagaaaatatttgcaaagcacacttgtgatagactcgtatccagaatatacagggaactttaaaaagtaacaagaaaacaacccaattaaaagggcaaaagatttgaacaatgtactaaagaaggaatggagctgtcactaagcccaagaaaaggtcctcgacgccactcttcacggacacgcaataaaagccacagtgagacagtacacacctatgggagtgcaaacggtaactagagaataaaaactcacagtcctaagggccgggcaggatgcgaaatacctgctgctctcacccgctgctggagagaaggcagactgggtgaccacttggagacacggttgggtagttttaatgaaagtaaacacacaccctacagtgacccagcaacctcgctcccacgcatttatctcagagtaagaaacagaaacattgtccacacaaagacctatccgagaatgtttacggtgactttattcataattcctgaggattagacacaatccagagggtggatgaggcggctgagctgtgtctgtatgatggaaacccacgggcagtggaagggggcggcctggctcacagccgcacagcgcgggaccagcgcagtggcagagggcacggcccctccagggtttgagtcacgtggcctcctggaaaaggcaactgtgggaacaggcctcagagcagtggctgcccggggctgtgggccagggtaggaaatccaccccaaaggggcccaaaggagtgttccgggctgtgggaacatatcttagctgtgctgctgtctacacaactgcatacactggtgaaggctacacctaacagtgaactttaccatatgtcagttgcagaccacctgatttatacacaaagaacggaggtctcggccgggcgcggtggctcacgcctgtaatcccagcactttgggaggccgaggtgggcggatcacgaggtcaggagatagagaccaccttggctaacacggtgaaaccccgtctctactgaaaatacaaaaaattagccgggcgtggtggcgggcgcctgtagtcccagctactcgggaagctgaggcaggagaatggcgtgaacccgggaggtggaggttgcagtgagccgagatcgcgccactgccctccagcctgggcgacagaaagagactccgtctcaaaaaaaaaaaaaaagaagaagaaaagaatggaggtctcactgcacccccaccccattgggaagcctcagagagtctctaggggctggaggggcaaatggagggggacatggtgctaccagagccggggcccagaggaaggtggaggcctagcgggaaaaggagggaggcgccaggatcgggggcggagaccccaatgctcctgacagcaccgagccgggcctcgcgcatttccgtggttcccgcatcccagctgcggggagccatagtttccggtctgtgctctgtgagggcagcgcccggcagccgagtccaggcagaggccgcctccctgcgcctggaatcccgaaggagcctgcgccccgtgtgtcccgcaggtcacggccctgcagctgggagcccggcttgactgacagttcccgccggcagcagcgctctgtgggccatggacccagggacagaggaggctacggtcacgccgcccgggacccgccgacactggacacttctcctgctcctgctgtggcgggagctgactgcagccggtggaggtgccggggtgggctggggagggctgagggcaggcctttatttccccaagtctcacttgccggggcgccgtatcccggcacggcttcagctgcctttctcggtttctgtcgccaccgccctccccctccaggctgaagatgccctcccgtccccaacccacacccccgaccccataggaatgcacccccacttccttctggcacctgccagtgcacctctcactcctggacctgaacttgcaactgagcacagctgtggctgccccaagggaaacttgctggcaggtggggtttcctcagggcgtgggcggctgctagaaacgagaaccaggagaaccacgcagccaggaagccagtggccaccgcgcacttccacccagaaacgcattccccagaacctggtgtttcatgcccggtaacaacataattaccatcataaagataaatcgttaccggagatccagacagccacccattttcatagctgcgaaagccacagtgaaacatctaagtccagtcaccataatcgtaaagccaccaagaactactagcagacgacgtcaacagaatgattaataaacatcttatttggttattttcagagcatataactccagaactaacttgatcagcttctcttactaaaatgtgcaaaaattttttaaatttctttttccttagggttgtcgctcaaaaaatgtctcatacaccttcgagaacgaatcaagtccctgtggattctcgagtataaacggagctggtgacgaggcctgacacacggtcacacctcaattcgcgcgtggcgcccggcacaggctgagccccgccagatacaccattagcctccgctgaataatctggattccatgcctccctttcttctgagaacacccttggaggcccctggcaggggctgagaacacaggagcgagacacaggcctgccctgcaggaccatgggctccaggaagctctgtccagtggacacagcacaacaggcaagagaaccacaaccaacgagtggggcaggggaggcaggtcacggagggcagcccacccatgccgcggggtcggaggccatctcctgcagcaggccccagtcccagaggtgggcatggcaggacatggggatggagaaggaggtgcctcaggagtggggtgcacagcggctgagcccggaggcaggagggagaactgccagccactagccctggagccgatgccctggtcagagggagagaggaagagggaacccttccgcagcacccagcttgaacgcgacataaagctatgggcctgaacctgagggcctcccaggcagacactgagcaagggggtgcaggggtcacgctggaccctcaagaccatctcaccgacaaggctccatgaagcccagcacagcaagaccctgaaggggggtcaggtgcccgctgcactcagacaccttctgcagccgcatttcagggccagggtgtccgctgcggaagcacccagcacagtgttcccgctcaaaatgaagtcaaatgtcaattatctgagatccatgtgacccattccatgtattttctaaacaaactctggagacttctatgaaaaacacagcagtttctaagaataatcacttgggtacagtgaacaacagtcccaaaaatgtccgggtcccgacccctgcaatggtgagggggcactggccttatcaatgccaggtgaggccctgcccggccccgagggcctctcacccagccaagcccctctcaatgccaggcagagagcaagactggtcaggataggcatctcatctctgtcaggggacttgctgtggaggcccgggacatggcagagtgcagacagcctacgcgttacctactagcccgtttctctcatgccccctctctctctcaacgtcgtgctgacacacactagctgccggccgcccagtggggacaggctgggttttaggacactcaagctctgaggtggacctttggccgtgcctctcacttctgtgtgccaagcactgggaatggatcagatcacagatcctggtccatggctcacaaacagaggaacagggacgatgaagaaagcccacagctgagggacacaggtgagcgctggggaaagggggcagccggcgtggggtggagcggccgtgacacggtgtgaggagccagtgtgagcagcgagcgtcagatggaccgggaccccgcccacgcacagcaccctcgtggcctcgctggcctcctgcacccccgggccctcaggctgcctggggccaagctgggggtcccctgggggactcctcctctcgccctgtcccactcagcatcccggcagccatgaagacgaggagcctgcaccacctggggtctgggttcaggctgtggcagccagtacacactggctccccggccgcccgtcctgggcgtgagctcaggcgccacaggacccctcctcccttcctggctctcccagcgtcacggcgggaattagcctgatccctcagcctcccacgcctgctgcgtgaggtctgctcctgacggggtcctctggctgcatttaggaacaaggagctccccgagtaacctgaagtccactctgcccagaggccccacaacttacaggatgccgccttcctgtgataccaggcagggctgcccatgagctttctccaagagcagccccacccctgctccaaacacaccatctcctggaagtaacagtattgccccaaaaaccagggggaaactgaggcaacatgcccccacccccacccgcccttcctgtgcccacactgtggggactaaagttgggacagggacagccaagacgtggtgaggagggaggccccacatccatgcaaaggtccccccacagatgccccggggaacagccctgggaagttgtctgaagagggccagagatgctgtgctcttgccttgaggggccatggaagcctcgactggcagtgctcactgacctgagcctggtgtgatgctctagcagggaccacagatgccaggccagatcccaagagcagatcaggaggaacacccagggctgctgtgacctcaagccctgcagcgacccctcagcaccatccagccaggctctggactgaaatgctaatactcgcctggtacagaacaggcagaaaaggggaagtaaatgctcattcatcacctacctatgatggaatccctccggaaaacgtctctatcgaaaatgtagaaggacaggtgacgaaagctccgaggaatttcacagtaaaagtcttctccgtaaaacgggctagtgagacaaagaaaagcgccagttagaacacaggccacgcttgcgcctcacccccggggcacacacgtgtggtcttagttttaaacatgccataagaatgccctgcactgtgtggcacgcatgagacatgaacctgcagctccctgtggggtgaagggcctcgtagctgctccccggcctccacctcgagcctttgcactgcacagatgaacttctgtactgggctgcctggcggcccggaagctgagacctccacagagaccacggccactgccagaatgacttccatgctacgtgctcaggtctaggtgcagcctcagggccatcgtgatgtttcgaaggtacctggtttggggcaggcagtggctccctttatgcattaaacataaaacacagcactccagtgccttggaccgctccttttatccagagatccagtacaaagtcctgactgcccagccgccctcactcctcggggagagacccccgctgctgactgtacttagagtcctcgctcctgggggagaggcccccgctgctgactgtgcttagagtcctcgctcctgggggagagatccccgctgctgactgtgcttagagtcctggctcctgggggagagacccccgctgctgactgtacttagagtcctcgctcctgggggagaaatccccactgctgactgtgcgtagagtcctcgctcctgggggagagacccccgctgctgactgtgcttagagtcctggctcctgggggagagacccccgctgctgactgtacttagagtcctcgctcctgggggagaaatcgccactgctgactgtgcgtagagtcctcgctcctgggggagagacccccgctgctgactgtgcttagagtcctggctcctggggaagagacccccactgctgactgtgcttagagtcctcgctcctgggggagaggcccccgccgctgactgtacttaaagtccttgctcccggaggagaggcccctgctgctgactgcccagccgccctagctcctgggggagaggaccccgctgctgactgtgcttacagagtgcatggctcaggccgcccatgcgtgagtcaccaggagatgcagccgccccacagaggagacttgaaataaccacaaccccaataaagaagcagaagccagtgggctttgccattcagcaaaccttcctgttgtcctgggctggcacaggtggggttagtttcctccccacgccggacctgttggcgattactgcggtgcacgcacagctaccaccaactcagaacttaaaacaagcccactttcatgcacattgatgctaaggtccaaaataggaaagatgtaagttattcaaggaggaaccattctgatagaaagcaaaggaaggtcaacgtgctgggccagggggcgtccacacagtcaccaacggcacaggccccaccccagccacacacagaaatgagctcagaccccgcacccatctgtaagggtgtaagggttggagctactagcctctcagaagaaaatgagaatgaacctgcaccctaaagtcaggtaaagatgtcttagatctgtcaccaaaagcacaagtgccaaaagaaaaataaatggaaaatcaaacttcatcaaaattaaaaacattaaaaacttttttgcattaaaagcattatttaaaaagtgaaaagggccagtgctgtggctcacgcctgtaatcccaacactttgggaggctgagactaacgaatcacctaagatcaggagttcgagaccagcctggccaacatggcaaatccccatctctactaaaaatacaaaaattagcagggcatggtggtgggcgcctgtagtcccagctactcgggaggctgaggcaggagaatcgcttgaacctgggaggcagaggttgcagtgagccaagattgcaccactgcactccagcctgggtgacaagagcaaaactcagtctcaaaaaaataataaaaattaaaaaaataaaaagtgaaaagacagactagaaaaaatattagtaagtcagttatctgataaaagacttatatacagaatatataaagaactcttatgactcaataaatgatgacaaataattcagtttaaaaaggggcaaaagatttgaacacacatatcaccaaagacaaatggccaacaatgtattaaaaatgctccatgtcattagcccttgagaaaatgcaaattaaaccaggagatacggcacaggcataagcccaaacctggggcgggcgactgttgctgcccggagcccaggtgggaggggcccagagtccaggtgggaggggcccagagtccaggtgggaggggtccagagtccaggccccaccccttctccctgcagcggccttaatgacaggcatttcatttggatttcactgatttcagtatttttataactgggtcagagactgggtaacatttactcagaaaaccattttttgtcataaaacaatcttccaagggaagcctaaaatgcctaggttgttttaagcattttggaaacacagcagtatccatttacacacaaaagaaacatcactttatctttcaatgaaggcagaatgctcagggacttccaccgactccattgtagcagcatcctggttaatgaaggcccattagaaagtcacgtttcctttaaacacattctcgcgttggtcgttgacgcagcgagccatcctctgatctcctgcgtctgcgtgggcaccgccgagatctgatgtcagggacccccaggggtgtgtgtgcccacaggcatgtgtgtgtgggtgtgtgcacgtgtgtgcccatgggtgtgtgcacgtgtgtgcccatgggtgcgtgtgcccacaggcatgtgtgtgggtgtgtgcatgcatgtgcctgtacgtgtgtgcccacaggcacgtgtttgtgtgtgcatgtgtgtgcccgtatgtgtgtccccacaggcaggtgtgcatgttcatgtgcatgtgtgtgcccacaggcacgtgtgcatgggtgtgtgcatgcatgtgccatgcatgtgcccatacatgtgtgctcacaggcatgtgtgcatgttcatgcgtgcatgcatgtgccctggagcacttgggtgcacatgtacacaaaggcaccacagatgcgccccacacaatgcgctgctttcataacaaggcgcaggggtcgtgaccctgcctccaccctgtgtaaagtcacagctgcaggatctcggggcaggacgcacactccccaggcagcgccctgtggcctccctggagaagcttggtgctctgcggacagcgtccccactggcaggaaaaaccactatcaacctcgaagccaaaagggacaccagacgtgcattttaatattcacgacaaggcctcaggtgacgagctactcacaggacaagcgttaacaattaatagtaatccacaaaacatttgggatttttacaacgacaaaacggcctcttctgtacgtcctagagcaactttcagggccactgaggcctaagtgatggcaggaagccgtggtgtttgaatgtgtgaaagcagcctggacttggcgtttccagccccgttcgctcccggcagagccccaagaaccaagggctggaggcttcacttcctgctccagagtggcaggtgcccaggctgtcctggctgcggtgcatctcacacaagaagcccagcgggagcacgcacagctctgggccttgcggcaaatgcgtaaccaaaaggcgtaaatcaagcttcgttcaccatggaggaacctcagaaccaccggcaccgatagccaagctgccagagaatggaacggacgccctccattggcacaaactccagcagccggcttgtcaggaagctgcagcagcttcagagcaacccaggcctcggggttcacctggcgcgtcaccgtttcccgagagccccccgcccccgcacaggcactgaggaccccaccacatgggcctgtgcctgcctggcaggaaggcagggaggaggaagtgggtcgggctggattgcatgtctgatgtgtgtccgatgaatgtccagtgcgtgtccaatgcgtgtctggtgagtggtgagtgtctggtgtgtgtctgatgtgtgtctgatgcatatttggtgcgtgtccggtgcgtggtgaggggcggtgagatgaggatgccagcgctaagcacaccccacaaacgggcgccgcgcacctggcatttaaccctgcacacttcctcaccaccctgatgcacagggtgggaaaccgaggcactccaacatctgatgaaacgaaactaaccccagggcttgggcagcagggctgagagtgcggcgtccctgggcgctgcccggtagcggggtgttcagttgctctgccaaaggctctgcacaagtggctcctctctctgtaactctgcttggcagtggggggctcggtggggggaggcccgtgctggctgggcacctgggagggtcccgtgaggcttctggtggtgctgacagctgtccgtggaaattgaggtgcttaaaattcataaataaaccagaaatccattcaataaaaagagataaaaatagcagaaagaggaagctacaagaaaacatacgaactccataaaattatcaccacagactggacgtgcccctttctaaatgtaaaagcggtttatagcaacacagcatggccctgctgcactacccctggggagcaagacctcctccagcctccacccaggaatttctccagcaatggctttagaaccttgctcctgaatcgcagcaggggaggcagcgctttggggccctctgtcaggctgccccccctgctaagaggagctgttgtccttgggaaccacgggtcccccctcctgaagaaggggaacgtcacactcacagttccattttacacatttgcagctgagaaccctggagccagaacaggctccagcacaggcgatgggtgagtgttttgcatgtctgatgtcgtttattctagtggttccaattgcctattttaatgtttttcttcttatttcatataactttttaaacttaaagtaataaagttattactaactttgtttcctgcgggtcacctcaagtctttcaggaaaccaggcaggacatctgcaggcggccggccagccttatcaacggagctctgagccaccaaccactgtgaccaagcttcattcccacgagctggacgagcagaaggcattgcagggcagtggggtccggagaggcggccgtgctacaggccttgcactcattttaatgaaggctctgcaggatttcaaggaaagctggagccagtctctgtgccagaatagagggttcgttcagcttcttagaccgatgatttatttagggaataagaagggcgattccagggacagtggaggcccccacaggaaggaaacctctccccacaatgactgtgcacagagccagcctgacacccaaggccacgatgccatagccagggagccctgaagaaactcctggaagaatgtaaaacccccagctcaaggaggagagtggaggcggttccccaccttctgggggcagttaacctctgagaatgaacccacagctaaaacccataaaacctccgccaaccacacccagacctggaaggggcacctctggccagggcgctcagcacgaggggacccagaacaatggcttccctggggtgcgggctcggcctgcaggatggaggctggagagctgccatcctagcgcacactgggtagatgcaggtgtttccaatgtgctgaagagggcagggcctggctgaggccctgggaggtcggagtcccggaggtgggtgggggtggtgagttcccaggtcacttccccaggtgtgcgttttcctcactgtcctgtcctattcattcattttagcacggaggccagaaccagccgagtgaagcccctgcctgaccactcaggggtgtgaggacaggggcgaggaccgggatcatcagtcagctcctagaatggcaggtttgtacctgcaaacggagcaccagagtgacatccccccaagacccccgagatgccatgagccccatggagaccacccacccggcaggggccagctccaggtgctgctgctgcggcgaggccgtcaccaccatccacgcgtccagcaggaagagcggattcctcgggcgtgaggctcaccactcacgttgtctgcacacctgcctgacgacctctcccgaacctggattcccaccacagaattcagctcctcgggtgctcaccagcccgtgacttgtggtcaccagaccggacggaaaacacagagaccatttcctgttttgcagaaaatcctgttgggccatgccagtcctagagccaaaacacggtgtccacttgagggtccagacctgaggccacccttgctgggacagcatctccttccctctcagagcaatgccactgatgcccagaccagcaaccatgcccgtcctcgcctgcccgacaatgcccttcccaggccctgctcctcggaggactggtcatgggcaccctggactatgccgacccgcagtccccagggaccaagtcctgctgctgtggacacaggtgaccctgcccctcgcaggggagctgctcttctcctgagcccaggagtgctctgaaacttatatcccaatgagaaccaaaatcaggagtagaagtgggagttgaaggccagagcctttttcgaagaacttccctaagctcttttaaatacctgcatccaggccagatgcagtggctcacgcctgtaatcccagcactttgggaggccatgccagaagcgccacttgagcccaggagttagagatcaacctgggcaacatagcaagaccccaactcaacagaaaatttaaaaattagatgggtttggtggcgcacgtctgcagcgaagcggaggattgcttgagcccggggttccaggctgcagtgagctgtgatcacagcactgcactcctgcctgagtgacagggcgagatcctgtctcaaaaaaccaaacacctgcatctcctgcatcttcagagcacagtcccgcctggaggagccgccgtcaggccctcctgcatcttcacagcacagtccccaggtgcagctgctccccccaacctaattcaggccctggtaagcttcacaaggccaaggggacgttggtctccaccaggaagactatatggcacgtctaaatgtaagaatctgtgacagacgtcgctgaagccaatgcgaggaggcgcaggtacccaggaggcacaggtacccaggaggcacaggtgcccacacgggccttgccgggggaagcacgactttgaagatggggacgtccacgtttcaacgctgccttgccagaggccagttccctcatctctcagcctcaggacaccgccctctccacagtgcagcctgcgggcacagagggcgctcggctggggaagggcagtggctctgcccccaaagcggcctccccaggacacaccactgcctggcttggaggtttcttcctctgccctgcacagtgagacaagcacatggcagggcctcccacacaccaggaccaaacaacggggagcactttcgatgtctttggcccccgccaggcgtggctcactggacccagaaaccacagcgctctctctctccatgactgtttcagctgcccatccccgttctagactgtgggaatagcagccaatgaagcaaagtcctggccccatggagccagccaaagagcacacagaaccacgaatgtccaacgcgggcaaggctggcgggggcagcactgtggcctcgctcgggggacagggaggcttacggacgagtgagcgcttgaacagcgctgtggacggtgaggagacccgcaggaggacaagggaacgcatgaatgaggccatggacggcgcggagagcgcaggaggggtctaggcagagggacaccaggtgcgaaggcctcgaggcagcagggcttgtgtgtggtaaagacgtaggagcaaggagaaggctgacgtggcctgggcagggcacggcaggaccggagcatgctgggagccgaggtcagaggtcagggtgcagccgaggtcacgtggtgcagagcagacatttcaccacagcagctgggaatatgcaggcccgtgcaagacactggatggacggatgcacggatggggcagtgggcatgcagggaggaatcacctgtctcaggtcagcagccaggagctgcccagacctggcacagtggaccaggaagggaaggtcacccaagcctccacaggtggggctttctgcaagcaaggtgcagcggtcagcccgagaggccacggtgccgagcaaatcctggttgtcctcatggggacgacaggaattcagttctggcagagccaagactgccgggaagccagaggggctcctgcaggaggtgacgggcctgcggggacgcgaagggccaggaccggacacgccccgttccgctctgcttccagtgaggcgagaggcgggcaggacgcagctggagccgcgcacgcccggagctcaggccaggactgtcccccagcgctgcgctcgcccgcggtggagctgcagtgttatcagtggtcagctcaagtccagtggcttgaaagggaggcagaggcctcaccttccctgaggctccctgtgaagagcaggaggctgggccctcgggaagaccccagccaggctctgccacctccacagccgggagacggggcctccaaagccggcagacggagcccccacagccggcagacggagccccccacagccggcagatggagccccccacagccggcagacggagccccccacagccggcagacggagcccccacagccggcagatggagcctgggcactgcacacagagacatttcttcttcccgagacctcgcacagaaattactcacttaaaagcacttagagttttttcattttttcagtggcaaatatttcgagggaataccacagaaatagccacaccaaaacccaactcagttctcccttctccacccccgccacggccggggacgctgcctcgatgcgcggggctccctccgccatggccggggacgctgccttgatgcgtggggcttgggttcttcaggtctcttgatgtttttcctcttagaaccgcaaactacggttgcctgaaaaggtttctaaaaaccccaggcgcccaggcccacctcagagaacggctctttaagggtgatgggttatgaaacaggagccctttgggaggccaaggtgggtggatcatgaggtcaagagattgagagcatcctggccaacatggtgaaacgccgtctctactaaaaatacaaaaaaaaaaaaaattactgggcatggcggcaggcgcctgtaatcccagctactcaggaggctgaggcaggagaatcacttgaacctgggaggcggaggttgcagtgaaccgagatcgcaccactgcactccagcctgggcgacaaagcaagactctgtctcaaaaaaaaaaaaaaaagaaaaagaaagaaagaaatacgagctttgaaatctatactagccatggagtctaacacgatccttaagcgaactgctcattacaaagcgtggcaggctgccttctctccagagggtttctggtgccctatccacggaggcggcagtgggattcagccgtcacctgtgcttgcggtggtaactccatctcagactcaacaggggacgtgtctgcacagagcacacggcgcaggggttgggcggggaggacggcaaggtcaagccagctcaggggacatggtgggcagggggctccagatcccacggtgggcagaaaaggcgggggtcggactgacgccgtcctggaccatgtccacgtctggggtctgcaggttccatctccctttccactgtgcctaaccttacatctataacctacatccagcaagacacgattttccacgatgagttgattcgtaattccatttatgtgcaagtttttagaattttcctgtgggttttttttttacttacttatgattttaattttgtttgctttaaaaaaaacacatgcataggaaagaatgcttcctttcatttcaattaaaaacaacaaattgcttttttttaagcaaaaattcattgagggggggctcgcattgtacaaagaaaatcagacccaccgggatggctgtgatcaaagagacagtaacaagggtagggaggtggagatgcgaatccaaacacacaacttgtgcaaaggtcaagtggccacagccgccacggaaaacaggctggcggttcctccgacgttcaacacacagtcgccacgggacacagtggttccacccccaggtgtgcagcaatagacatcacagcccacgtccgcacgcagactcggacacgcgtgctcacagcccacgtccgcacgcagactcagacacgcgtgctcacagcccacgtccgcatgcagactcggacacgcgtgctcacagcccacgtccgcatgcagactcggacacgcgtgctcacagcccacgttcgcacgcagactcagacatgcgtgctcacagcctcagtcatgacagccagacagtggaaacaaggcaggtgggcctcggctgctgagggagcaacagcagaacggtgctcagccctggagaggaaggacgcctggaccctggccccacaccacagcatccacaatgtggtgccaaccaacaggccacgcacacagaggccatgggccagacgcttccactgacacgaaatgcccaagagaggcacagccggcgacagaacggggacccgtgtctgccgccccaggagaggctgcaggccggaaactggaggattacagggcgcgagtgtcgttttagggagatgaaaatgttctaaaattggctgtggcaattgttgcacaactctgcaaatatactaaaaaccactgaattgtacatttcaaaatgggtgaattgtacggtgcttgaattatacctcaataaagctatttttaaagaaacaaaattttaaatacgtaaaaaaatcagaaagtgaaatctggaattaacattccaggaaacatcctcctggagttttttctccaaaaatataaaatagaataaaatatataaatgttataggtttaaaatatacaaaatataaatatatttgtattacatttataacataaatacaatatttataatacaaatataagtatattcatactataatgactcattatattataatacaaatatattaacaataatagtaaatatttatgttataaatatagaagatacgaatggaaatacggataaattttttaaataaaagtgaggttatgttccctgtgacagagtcagctttttcctttcacatcaggccatgggccactttccaaagagctgataaaacgctggggtcagacggcacgtgtgtgcgtggacagcagtgccaggtccccctgccatgtgcacgctgtgtggtgggagcagcaggggtgagcaccctgggaacgcagatctgtgcagtggctgattgtccccgtgggataaattcctccaaggatgtgcactgtcctgaggcctttgaaacacaaagccacagaaccctccagggagtctggaccagtgtccacccccagcatacgccgtcttataaatatttctacagtttgctaaaccggtggcaaaaacctgcttaaattttaaatgtctggctcattggtgaggtggaatgtccatctttttatgagcagttttaaatctcattttttcttgaaatgctctgggcctgttttctattagaatgaccatcttttcatgctcaggatttaaccctccgggaacttctgaatgtgtgttgcaacttaaaagacatattatttcacaacatttaaggaggatcttttttgaactaaaaaaacccccacaaatttgttaaatttgtcaccagtgggtgactatggacctgtgatcagccaactctgaaatgagctccagcagatggacacagcgtcccaggacctgcaggagcagaggctgcgaggccagccacgtccacctcgatcacgtcacctcgtgggcagaatggcctacgccccatgtcctcccagccccacccagaacccacggtgagcacccggcaggaagtggccacagcaccatcactggaggccacgcggagtctgaggacagcagctttcccccctatgctgttgtggggactccaggctcagcctgaggacagggtcagttccctccacacagcaccaacactcccaggtgcaaagcccaggcccacggacagccccccgctgtccgtgggtctcatggtgggggcacccattttctttcatcagcaggaaggtttgtgctttctccttcctgggcagcagagtttgaagcgtattccaaaagaaaaatgaaaccggctgaacgctagggcattcctcccatcccccatcctgttcggtggcctgtgccggacaatctcttctttctgatggactcaaaggggccacacagccaccaggtgccccccttcccatcagcagcttaacctcggggtatctcttggacaggccggctttgtctccagccgaggtcagcagcagtcagatgcgggatgaatgcctggcccaggcggcccccactcaccgcccgagggctctggaactctctttccaaataaagaaaaagtgcggcctgagaggaccaggctcgcctgaaatcctgccatgtggcctaaggaaattaacgcacgcagcagcctctccctctgaggcagagaccctggcaaagtctcctttccctcagtcatttctggaagaagtgcaaatgaagtttcacagaatcaagcaaactttcacggggaaaaaagaaaaaacctcttgcagaaaacagagttgacctttaagtagtggctctgatgaggggaaaccatctgaactgaattcctcctcctcctggagcctggagcaggggctcagctgggaccagcagagaaacccccgccttctcctccctgagtcacttcccagcatctgcgcaaggctggcgctgccccatcccgcctgcggctgctcccatcacgtgatcataagaaaataaacctggtttcccagctctgtgctctgccgcaggctcggggcccatttcccaaacgctggggggagccgggagctgccagggctgccccagcctcggggtagagggtaaaggctgcgtgaagaggaaccaaaccccaaaccgggtctgcgaagcagccctggggctcccaagccagcctctgggctgagctctgcggtcctgagtcactgcctgactcatcctcagaggcgccccacagagaaggggcaacttggccagggaaaatgctccatctccgcaaaggacaggaggcaaaacacacccatcagaagcacatggccagtgcagggccacacagccctggctcccacagaccgcaggctggagaatgggggtccgcggtcagctcatagcccacccgccacccagcactgcagggtcacacagccctggctcccagaggtcagaggctggagggcaggggtccgtggtcagctcacagcccactcaccacccagcacggcaggtctcagcggaagccccacacacactgggttgcagcctcctgtggttcaagatgggtggggttattttgaaatgttggcaaatagagctgtgagtcttcaaacggaacccaaagactcagtgaggaaagcaggcgggctgggctgagactcacagctgcagcggccgtggtgagccacctcacctccccgagcctcagtctccccatctgttcaggggcaccgaggagctgcccctcggctcatgggctctgtggtcgccaggcacgccacacaccacacgccacacaccactgcacgcagcaccccgggacactgtggcctcggctcccgcctctcctgcacatgaggctctttcctctctcccaccccataccccccaaaaaagaaccaccatccttacaaacaaatgaaaatcggctgggtctttagggcccggccacgatgtgtgactgcagcagtgactctcaggaggaggcacaaccagacaccgggtcccctgcagcagctgagacacctcaaaccccaaaccctcagtgaggccctggtgggaaaaggggctctccagggaggtgccaggggcaggagagagggccagcggccgaggagcgggaggcggccgggcgagaggaggcccgggcaggagggagaaggggggacctggcctttgctcctcatgggatcctcggtgcggccccctcgtgacaggcccagcctctccctgcagtggcccagccacagctcagggccaggaggctcctgcaggcacaggcggccgatgagtcccttccaggcctgggcctggggcagcctgccatgtgcagtagacactcagtactcacagaatacgagcaacctcatgctctccgccggctgagttcctgtgcggctgagagaaccccctgcatcattctgacacaggtgcgctcctgtgagccagcatgacacggaaggacacacacatgcaggtggagatggagatgctgggccgggcttgggggtcatacagacaggaccaggggctctgacctgctgggagatttggggccagcattccaggactgagagaacagatccctggcctggggtgctctggggctgaggatgggcccccacctgggctgaggatgggcccaacctgggctgaggacgggcctccccacctgggctgaggacaggcccccctacctgggctgaggacgggccccccaacctgggctgaggacgggccccctgacctgggctgaggactggccccctgacctgggctgaggacaggccccccaacctgggctgaggatgggccccccagctggggcactctggggctgaggacgggccccccacctggggcactctggagctgaggatgggcccccacctgcggtactctggggctgaggacgggccccccacctggggcacttctggggctgaggatgggcccccacctgcggacaccccggggctgaggatgggcccccacctggggtactctggggctgaggatgggtcccctactccagcagttctgggatattctgggcttcaagaagcctccagtcgtgtcaagcaggtttttgtttaagctctaacttgagagtgaaaataaatgttcatgggaaatgtgacttttcatgagtcgcctaatgtcaaagtcggtgtttcctaagtcagcaacttggtttttattaaaagcatctgagagaatgaaccgtctgtctcccaaaccaccaacttcctcctgcccctttcagtttctaaccccaaataacttctcccctcccgaaaaactttggagctgtggagacatttcttggtttagtcatttctactacacaaaagtactattttgggggtgatttacatcttgcagtatgaacagaaagaaacctccctgtctttaacaaacacccactgcgtgcacacaggacgggacgggcttccacccagaagagctcagagcctgcccctcagggctgccaagtgagggtccctggtgatgtctgatgtcctcgtctgcctgggaagacccagctctcctcgctcagctctagaagatctatctgttccttgacttgtaacttctaattgtacataaaacacacaaacaaaagaacaagaactcccccataattccacttctcagaaatcacatcacattgacgtttttgtctgcgtatccagatcattttgggggtgctcatgattttttaaacaaaagaacttttcctacagacacagctttgtaacctaacgcataaccagctttcggagcaggagttcaggccgtggcacctctgggtggagggggcacagaaaccagccacgcctgcagtttcttcctgttgtggccacggccccttctccccgagatgggcatgcaaatgaaccctgcaaaggacgcaggagcaactccacagaaagggggggccagggctccgcgtggggcagagggctttgcccagcctcaaccccagtggcagggggtagggtcagacccagaaccctgaggcagagcctccctgagccaggactgtctgcgtggatgagggtttggggagaggtcagccacgtgggcgcagaggaagcaggcagggacagacaccattccacgtccttacgtggatggaaggaaatgaggacacgacacttactgaatattcttgcaaatgactggactaacccagcaaggagagatttaggttctgttgtgtgtgacgccagctgttcctttctgctggacaagacggtgatttccactgcagcgcagccttggggagcggggtcatctccttgttttagggtcgtgggtgccggcccaggggaggtccagggcgggaagctggttcccaagccccagccctgccaacccaatttcagggagccttttagtttaagtaaataaggaaacaaatagtggctgccctttaaatgattaaaaatgattgctctaaaaggtatggattgtgaacacagttcactctcaacctcagaaaattatttttctagtaggacagaaactgccaaaatcacttccttggagaagggccaaggccagagagaaagggcttgttctctgaaatgtgtccacttcgatgcgttctgaagttaaacctgtgacagacactgcccttcaacctccaccttgaaaaatacagaaaaaagggaagacagaggacgctctccccagacgtcggctcagcactcgataaagaggccccacagactccagggcctcggacgcgcggcccaggggcccgggccacacgcagggaggaggcgtgggggacacaggcctgaggtggagctgggtcggtgacctccttagtgggaaagagggaagaagagaagctgagttccgcctttccttcctcacacattccatttgcagcttcctgctaagtcagacggcgatattgggcaacagcaaatcaaacttgacccaagtgcttctccccagggaatgtgagaaggggctcctgcccggctgcagacccagcggccagagagcaccctggggcccttctgagctcagagatgcagacgtgggcttttttctttccacagcgactttgccaaatgaaccatcagaccttaaaggtgacactgaccttggaggaagcacacggggggctgggagactcagggaccgggagacttggggggctgggagactcgggggccgggagactcgggggaccaggagactcagggggccaggagacacaggggccaggagactcaggggtcgggagactcgggggttgggagacttgggggtcgggagactggggggtgggagactgggggaatgggagattcggggaccgggagactcggggagccgggagactcggggagccgggaaactgagggggccgggaaactggggggccaggagactcggggggccaggagacttggggggctgggaggctcgggggctgggagacttggggggctgggagactcgggggccgggagacttggggggccgggagactcgggggctgagagactcaggggaccacttggggggccaggagactcgggggccgggagacttggggggccaggagactcaggggccgggagactcaggggtcaggagactggggggtgggagactgggggggtgggagactcggggactgggagactcagggagccgggagacttgggggaaccgggaaactggggggccgggagactcgggggccgggagactggggggtgggagactggggggtgggagacttggggactgggagactcggggagccgggagacttggggggaccgggaaactggggggccaggagactcgggggctgggagactcaggcggccgggagactcgggggttgggagactcggggggccgggagacttgggggctgggagactggggggtgggagactcgggggatgggagactcggggaccaggagacttgggggaccggccccaaagtgggtgccaccatggagcaaggagggggcggtggccaggactaaactccccagcatgtggggcagccctgcctgacacctgcctctcaggtggatgtcgaccaatgactaatacaggactctgttaatgcatgtgcaccgatggagggcttccgaccacagatgtagcgtggattccagctgcaagtttatgagagagccagcttttgggttcaagtacctttcctgccaactttttgtatggggtgggttgatttgcgttttgccctcacactacaggggcggccagcccgcacagccctccaaatggacagggctgccagcgtccacactaaacggcgccagtgttacacgtgggcagggctgccggcgtccacgctaaacggctccacagtcttacacgtgggcagggctgccggcgtccacgctaaacggcgccacagtcttacacgtgggcagggctgccggcgtccacgctaaacggctccacagtcttacacgtgggcagggctgccggcgtccacgctaaacggcgccacagtcttacacgtgggcagggctgccggcgtccacgctaaacggcgccacagttttacacgtgggcagggctgccggcgtccacgctaaacggcgccacagttttacacgtgggcagggctgccggcgtccacgctaaacggcgccacagtgttacacgtgggcagggctgccggcgtccacgctaaacggcgccacagtgttacacgtgggcagggctgccggcgtccacgctaaacggtgccacagttttactctcttggaactgtcccacatgggtttctctttctttgctatcagtcttttgttgtgtgtgttttgggtttttttgagacaaggtcttgctctgtcgcccaggctgaagtgcagtgatgtaatcatggctcactgcggcctcaacctcctggcctcaagcaatcctcacacctcagcctcccaaagtgctgggattacaggtgtgagccaccacacccggccagaaccatgatttctatttctaaattcttctgaaatatctgaaagacaacaggcccccatttctcaacctcacctgaaagagaggttcccaaacagattctcctcccactggctctgattcagcgggtctgagaggatcccggcctgagaaagactgccagtaattctccaggcccacaatccataggcctctaacaacagaccatttaaacacagaatggacttttatccagggaagctccaaaggcacttctgaagggctcggtctcttcccattttcttcagaagaatggctgtgcccagtcatcgccatggcaaccccaagacactctcataaagccagactgggcgcctgacaatgcccctcagcctgcagttctttttgacgagttatttcaaagaacccggagcgtgcattaacataacacaaatgactctcactcctcggcctggagggcagctgcgccaaagccttttggaagcactgtcagtgacggagtgatatgagccccagtctctccagggcaggagacccctcacagttttctagtaagtaaactcacccagtcatcagcatgggttgttcattcccacttggaagtagccagatgcaaggatataattctttagctaaacatgttctcaaaatcaaaatagctgttttgatcaaagcacacgacccatgcttctgaactgaacggtgcagtcacagctgcaaggatgtcttctctgatccccaagccgctccttataacccggtggagtcacagctacacggacatcttctctgatccccaagccgctcccttataacccagccgccccatgcttcccccgaggccgcagcactgaggccctgcctggcacactctccctggcttctctcttcccacccccgacataaatcgccatggcttcctgtccctgtgcatcccaccccgtgccatgtcctggtgttcaactgcagtggtcctccgagtacggcctggccacttagctggagcttttcagaaacacaagttctggttgtgctctggacatcctggggtcggcacccacatcttcacacgctcaagttgagggggaaacttgttgattttaagagtttgtttttcttggctgactcctctcttcctcaaatcatatcaataaacactttctaggcctcttacctcagttaacacccatcttctgtatagctattttagaaaattttacaggaagagaaaagctttctcagtatttccccctctcgaaatccttaatttgtactcttttgtggagtgcgagcttcccggttcatctctaattaaaaagcactcgtgcgagtccacgcagggggaccgccgcctacatgcacttcctggacagcgggagcatttagccaacaccagttcacatccacgcaccaccaaggacagaagctcagctgcctgcacaccagagccccagggagcatctcctcctcaaactaagcaggaggaaaatgggaaggtgatgtacatgctcaggacataatctacatacagaaaaattctctacacgcgggaaaataggatggtgacgtacacgctcgggacactgtctacacacagaaaaattctctacacgcgggaaaatgggacagtgatgtacacgctcaggacattctctacacatgggaaaatgggacggtgatatacacacttgggacattgtctacacatagaaaaattccctacacgcgggaaaatgggacggtgatgtccacgctcgggacattgtctacacacagaaaaattctctacacgcgggaaaatgggacagtgatgtacacgctcaggacattctctacacatgggaaaatgggacggtgatgtacatgcttgggacactgtctacacacagaaaaattccctacacgcaggaaaacgggacggtgacgtacacgctcgggacattgtctacgcacagaaaaattccctacacgcgggaaaacgggacggtgatgtacacgctcgggacattgtctacgcacagaaaaattccctacacatgggaaaatgggacggtgatgtacatgcttgggacactgtctacacacagaaaaattccctacacgcgggaaaatgggacggtgacgtacacgctcgggacattgtctacgcacagaaaaattccctacacatgggaaaatgggacggtgatgtacatgcttgggacactgtctacacacagaaaaattccctacacgcaggaaaacgggacggtgacgtacacgctcgggacattgtctacgcacagaaaaattccctacatgcgggaaaacgggatggtgacgtacacgctcgggacgttctccacacatgggaaaatgggaaggtgacgtacacccttgggacattctctacaccaaagaaaacacatcagtgccaagtaaagcaacagaagacattaccagagtgacttttccacaattttggtcctgaaaacctcctcctggtccaggttcaccgtgcagtagcaatccctcatcttgctcggccccgggtaagagggaaggtttttggcttcacctaaaaagtaaaagcgacatacatcatcagcagcgtagaaatgtttgttccctgctacatcgcagacacgtttccagcctttgcttgtgtgcattcactagctctctataaagccttggtttttttgccaccacaagtcaaaatgtggatgtgcaccccatgtgtactgccgaaaggcgagggacatgcacgccaccctctaatgcaagtcccgcaagcagggacctgccagcctgggactcaggattgctgtgtcttgtttacctgcattagtccctttattttaatttttaacatacaattttccatctctgacctgctcgcgtgcacagttctgtggcattaaccacgttcaccgagttgtgcaaccatcaccaccgtcctctctggaacactctcgtcttcccaaacggagactcggtccccattcaacactcactcccatccccctcctgctgtctcccagtggccctcaccccactttctgtctctgtggatctgactactctggggcctcacgtcggcgggatccacaggacgtgtcctttcagcccggctcactctactcagcaaatgtcctccagggtggcccctgctgtggccgctgactggattcccttctattttaaggttgaataacttccatgatgcaaagggacctcgtcttgcttattcatttatccactgagtccctttttattttgaattttattttatattaggtcaaagttggagccagaattaaaggaaagagctctttcttgtggacgtgagttaactgtaaactccagctgttcgaattgccagtaaagagaagcgtcccagagggacctaagctaggtccacctctccctccttcaagcccacagagacgccacctggacgtgcttgaaggaagtggggccagttcctggctggccctgcagaaaacgcccgtgatcccggactccttgtttgccaggggtcagtctggaggtcataactgaaccccagctgcgacttctctgctggaagctcggagcatgccccagcggcaagcctaacggcccagtttactggagaatagggagtgagcaggaagggatgagtgacagctgtcaatccagacagcggatgcccagtttaagtccattctgtaaaaaaaacgcctcaaacacactcgcgcctccccagggccttttctgcctccgtcatttggctctaaagacgcctggcagtggcgtctccacgacgcaggatgagaggacagatgcaggcacaggcaccacgctgagaccacaccaaggctcctgctggcgccactcagggccacatcaccttattcttgttgaaacaaacaaaatcaaaaacgggagcagagtagaagtttctcagaaccccacttccgccactccgcgctgaatgtttcgcgtcaactcagcaagcgcacacgtcatggctcacatggggcagtcggctcatttcaaagatgccagtttgcaaactggcatgccagcaactccaaagggcagagataaactcagtttgaagctttttaaagacttttcatccacaatattaacctgaggcactgtgagaaggagcagaagccccagggtctggacaacgcctcccgtgtccgcgccgcgtatctctgcgtgtggaggcaccggcaggacgaagcctcccgtgtcggcgccgcgtatctctgggtgtggaggcgccggcaggacgaagcctcccgtgtccgcgccgcgtatctctgcgtgtggaggcgccggcaggacgaagcctcccgtgtccgcaccgcgtatctctgcgtgtggaggcgccggcaggacgaagcctcccgtgtccgcaccgcgtatctctgcgtgtggaggcgccggcaggacgaagccgcccgtgtcggcgccgcgtatctctgggtgtggaggcgccggcaggacgaagcctcccgtgtccgcgccgcgtatctctgcgtgtggaggcgccggcaggacgaagcctcccgtgtcggcgccgcgtatctctacgtgtggaggcgccggcaggacgaagcctcccgtgtccgcgccgcgtatctctgcgtgtggaggcgccggcaggacgaagcctcccgtgtcggcgccgcgtatctctgggtgtggaggcgccggcaggacgaagcctcccgtgtcggcgccgcgtatctctgcgtgtggaggcgccggcaggcgttcccagcagcacccgctgctgcccacacggagcagctctcagggtctcactgcttgcggccgtttcccgccagtgcccccaacacacagtctacctctctgggcctcaaagtcctgaactgcaaaagcaagagacacagcagctctcgaaggctcctccggctctgagacgcctctaattcaaaaggttctggaaatttttattttgggaatcattaaggaagcatcaatgataatcggttggtgggaaaaaatgagtatttcctgataggcactggaccctcagaacacctcaacacggcgactctcccgggatgcgccttcttcacccgctgcatgggagaacacagctaggctgctacgaggcacctggctccaggccaggcctcaggtcggtcatcccatgtcagaagacaggctttccgaaggctcccaccgatgtgaagatcccacacgcagcacacgcacacacgcagcgcacacacgcagcacacgcacgcaggcagcaccgcacacacacgcagcacacgcaggcagcacacgcacacacacgcggcacacgcaggcagggtgtgtgatgagttcacaggcacgaaggggagaacatggccggcgagcttctccagagagggaagggagcctgggggatggcagttgaggttcccggagcagacgcagccttcctggtggccgcggctgcccctgaatttgagggcagccgcagcacacccagcaagtcggacaggggcccctccagcctcccggccctgttttggaactgacggcttctgcagcagatagaagtccttaccctcaaacacagcttgactttgctgactttccttctgacacctttacagtgtgacctgacgctgaccatatttcccttgggattttactgggttttttgtttttgtctttgggagttttttgtttttgttttgttttctgggatttctttgttttttgcaacaaatgagtgtagatatttagctgtaagttcctgtgtttcttaaaaggagagagaaaaaagcttttgaaagtcctgtgggagatggtgtttgtggataatacggaactgagatttgttcccacagggcctcaaatcacagcagtaacagctgggtcttccgaaggcggacactgcaggacggaaacacacaagctttctgtggagtccctgtaagacagacgccgtacgacatgaaaaggccggatccccctgcgctggcgccaacacaccagattcatccctccctgcctgatgatgcccagtcccaccgcactggcaccaacgcaccaggttcctccatccctgcctgacgatgcccagtcctaccgcactggcaccaacgcacccaattcatccctccgtccctgcctgacgatgcccagtccccccacactggcaccaacacaccggattcatcccttcctccctccccactcaatgatgcccagtccccccacactggcaccaacgcaccggattcatccctccctccctgcccgacgatgcccagtcccaccgcactggcaccaatgcaccggattcatccttcctccctgcccgacaatgcccagtccccccacactggcaccaacgcaccggattcatccctccctccctccctgcccaacgatgcccagttcccccgcactggcaccaaggcaccgggttcctccctccctgcccgatgatgcccagtcccctggccccaaaacacaccaggttcctccctccccgcccgatggccccgtctttacctccttctccttgctcactgtcatctggggctgagactctttctttttaatctacttttgctatgatgcatttaataaaaaaaaaagtggggggacaaaatgcaagcccatttccctgcctcaggcttctgatgccatcacctccaaggcactggttttgtttccaactgttaataaagcattgaaacagaaaaaaaaaaaaaaaactcctgagaaacatcctggttgctatgacgacagcaacaccagggagcctgctggacgcaccaacatccaatgagctgctcagaccaggagggctggggctgctgcagcacggcctggccacgtcgccccggggcctcgccgtgtgtgccacatgcaccaggaccgagcctctccctgcagccccacagctgagcgggacgggggctgccccagctcccaagcaactgtttcttctccaccgcaccccaaacagttcattcagttaccttcaccaaaggtgcctgttctgtctctcttagaggaaacacgttttctcttttttttctggtgcacagagacgttcatataaaaagacaaagctgtctgtggtatacagtaagtacctaattatctgttgcatgcatggatgaataaatgaattaaaagaaaagtaaactggtttcatcctaacagccaaataagtaacagttctcatgaccacttttcccacagaccatgcctctaaaacatatgcggtgtgttcaccagccggcagactgatgaagacagccaacacagcacctcgcatcggctctgaaaactcaactaacaggagtaaaaggcagcacttaaacacatttaatgtaaacagcataacaccgcaaaacctgatttccaactccagggatcaggcagtgagtaacaaaaacaaaggccctgatccaaagcgtcatgactcccacgcccacggcagcccttctgggccatggagggaagctgcaccctcagggtgagcacaggcccagccctgaccgagggttaggatgcccaggcttccctggaggcccacacagggtctccaagtgctgacagcgagctgtcggggctgcccgcagcacccggagccacacccctgtacccaggaggagctgtgagggcatggggaggtctccacagaccccacccagcactgctcctccctgcaggcatcctggggagggccctcaggcggggctggcctcatgtactgctcaacacagcagcgggcgtctcccaggcgctcagcagctcagctcagcgcccagtgaagagggcggaggaaggaatgaaggcagccacgggtgaggacgagggcccagggctccactgagcaaagctcctggcaccaacccagacagaagacgtcctggagaggccagggctgtgctggtactggccgcgtccacccaggctgggcgctcttctctttcccacgtcatcacggcgttttactcaactacaggtcggcctcactgaaataacgtggaacaggtgatggcgacagccccggtgcatggtccagcgaaagcaaccccgtcccagcaataaagcccagggcctgttggggaaggagaccctgcgggagaattggaggaagtgcggctctcaaggctcccaacctcagccttttagtcgtcccaacgcaaaacattcaaaggggcctaaaaattttgctaggcacacagcgtcttctaacaacataaagtatttaccggaacaatagtcttgtgactaaaatatctgaataaaggatgaagagccccgtctactttgggctatttagaagcctggaacagcgatcccagccctggcccctgggatcctcactcgaacaggtcctcctccaggccctggcagggtctcagtgaggcacagaagcctctgtgccatgcgtgggtagagacccctctccgggctctgagctgctgactgcaaggcccatgtgccccctggctcctgttcgcctctggacacgggggctccgtgactggcctctgagtgggcctgagtgcccgtccgcactggcctccccacccggcaccctccgtgggacgaggctgcacatctcggtgggctgactgcggtgcagaggccataagaggaagaggcgggggggccccgaggcaggggacacagcgtcttgaggacacagcatgaccctgacccccacgacccctggcaacacaagtgccttcccgaagggcctgcgaagctgccagaaataggcagaactcggcgaggccgtgggagtggggtttcctctgggccgagtcgagggcagacggcacctgctctatcctcacgctcaggaggggcagaggccgctgggcttggatggagccaggcccaggtcttgtccagggctctccagggcaccatgctcctccctcaagaggactcctgtgggttatgaatgacagaagcccaggctgccatcctcaagcaaggcaccccccaatcctcctggccgggaggggctgctgggagcccctggcaccagcgggcttctgtgggcggtggaaggaggagagggctgtgcgggctgattccaaaactcactgggtgacaccacctgcccagggagggcccagcactgccgtccagggggtctgcctgtcgtccagtctccttgagagcacctccagctccctccagtctccacggctcttcagagggcacgggaggttctgctgaggggcgggtgaccaggcccagatgttaaaccctcccaaataacgggcatattcaatgtaattgaaacttccaccacagggagaatgagtctatggtgacggggtggcaggaggggtcctagaaggcgcccactgtgcttactggaggcctgaccccgacaacggctgaaacaggggtctcccccaggggccactgaaacaggggtctcccccaggggccacctcccagggcacgcttggatttcactatgggctgtgcaaatggcatctggtgggcagagtgcagggtgtcttctgttcagtgtcctgctgcacacggtgccccagggcacagggccgtccacctagaacaccaatagtgccgtgtggcagagggccgtccacccaaaacaccaatagtgcccctcggcagagggccgtccacctagaacaccaatagtgcccctcggcagagggccgtccacctagaacaccaagagtgcccctcggcagagggccgtccacctagaacaccaagagtgccccacggcagagggccgtccacctagaacaccaagagtgtcccacggcagagggccgtccacctagaacaccaatagtgctgcgtggcagagggccgtccacccaaaacgcaacagtaccccagttacacgctcctggtgcaaatgaccctcctctcgtgcttggtgcaaaggctgttagcaacgggccacacaggagatgctgccacgtcactccagagactcacgcgtcccgagacccaagtgatccctaaacgtctaggaggagacctggccttggagccaggtcagccagaaggttgtccaggccgggcctccccagggctgcccagtctcccgatgcagtataactctcaaggcgcgggggccgcatcacccagcactctggaaatgctgtccgcagaccacggccaccagcacatgcactctcgtggttctgactgcctgtgaatccagctggtctacaatgagccgctggggaaaatacttcaagtcctgagatgaatggagcaggaatgcctctggaatatcctgagaaacacgactccaaaccctgtcagctggttctaactgtgctcactcttataaacaggtaataaaatatgggaaagaaggcgattgcagacaggggacctctcctccacagagacgtgtccaccaggagactgaggcaaatcctatgggttcaaaaccgaagtttcactggcggctgaaaacacccagggaataacgaggaaagagaaggcaaaggtgggctgaaatgaagccgcccttctgagttcacaaaggagcagagacacaccggtgctgcacaggaacccccagggcccccgtgttcctagcgcagcagagcctgccccgcatccaggctgcatctcctggggctgtgactcctctcctgagtccacacacaggacctcacacctgcactcaccggctgcagctgcacacacaggagagcttctcacaggacaaatgcctggaccccacccagagattgccattctttgactaggacgggctccaggcagtaagaacagacattcgtcttgattagaaagcctgcaggtggttctgggtgcagccaggactgagaggcattacttactgctgagaactgagaaggtgtgaagatgcccctacctcctcgccccactcaccggggagctgcgggtctcacaggggcaggcaggaggccagagacgtccacgtctgagacaaaggacatcaccgcaacagcagagccagagctgcagcgtctgcaggtgccctggtttgcctcacgcagtaccaaattgggattgggaacccagtgatgcctgcacacatatcggctgcaccttgggagcagggcctgagcctggggaaccctagtctcttataacgggcagtggcaacaatgctgacatctgcctcggagagagatgctttcttcctgatcacggacagtgggcaaacctccctgtgctccgaggctccgaggctgctccccgggtggacacacgcgcttgaatggagagtgaggaacaaagggaactgggtctttctcccttgatgcgccgcactgagataaaaccatgaagaacgtctcccagctgcgtcccgtctgggggcagccccagagaaggaatggggggcagggaaaacaactttccttaacccaagcaacgtttagttcacacccagcctgtacgcaagaggggaagggacaggcctggggctgcacccccaggtgggtggtcccaacagaggtttaacaacctggttctctaggggaaaaatgcatgcacgagctcaactaggttaagtcatacattgcactagtgtaaaagatgtgtagcacacaactcacaaaaaataatgagatacacagtcctctacttcaaactcacagagctaattgattctcacagcaaactcttgtctctaagccaatcctgggctgcatttaaccaggatttgacaaacagaggcaacgcaccctctgctagctggttctcaaaaagtgcgtcatcactgagtgtgatatgtgtcgaccattaaaacatttctcccactcatacaaattatattaagctgacatctcttctggctttcacactgggaatgctggcgcttcactcattcatcaatgtcacaagcaactttgttgaatcaggtgaagttttaaatgccagaaaaacattgtcttaatttttttgtgctattgcagtgtaaccgctatatacaagattatttaattcagggtagcaagattagatgatcaacaaaacctttgttcaaacgtgagctcaatttcctccgatgtgtggcccatcctgatttctgtggtgtgaacattcctggccgatttcaagcgaccagtgtggccccaaagccagagagaggagagcagggccccgttcagaggcacccacacctccagaagcacccagccagacagcctggagcccagcagcaatggcgtgccgtgaaatcacaggaagtgctgagtctggagtatcgactcccttcgtcctcgcggggaaatcacggggaagtggtgagtctggagtatcgactcccttcgtcctcgcggggaaatcacggggaagtggtgagtctggagtatcgactcccttcctcctcgcggggaaatcacggggaagtggtgagtctggagtatcgactcccttcgtcctcgcggggaaatcacggggaagtggtgagtctggagtatcgactcccttcgtcctcgcggggaaatcacggggaagtggtgagtctggagtatcgactcccttcctcctcgcggggaaatcacggggaagtgctgagtctggagtatcgactcccttcgtcctcgcggggaaatcccggggaagtgctgagtctggagtatcgactcccttcctcctcgcggggaaatcccggggaagtgctgagtctggagtatcgactcccttcgtcctcgcggggaaatcccggggaagtgctgagtctggagtatcgactcccttcgtcctcgcggggaaatcccggggaagtgctgagtctggagtatcgactcccttcctcctcgcggggaaatcacggggaagtgctgagtctggagtatcgactcccttcctcctcgcggggaaatcccggggaagtgctgagtctggagtatcgactcccttcctcctcgcggggaaatcccggggaagtggtgagtctggagtatcgactcccttcctcctcgcggggaaatcccggggaagtgctgagtctggagtatcgactcccttcctcctcgcggggaaatcccggggaagtgctgagtctggagtatcgactcccttcctcctcgcggggaaatcccggggaagtgctgagtctggagtatcgactcccttcctcctcgcggggaaatcccggggaagtgctgagtctggagtatcgactcccttcctcctcgcggggaaatcacggggaagtgctgagtctggagtatcgactcccttcctcctcgcggggaaatcccggggaagtgctgagtctggagtatcgactcccttcctcctcgcggggaaatcccggggaagtgctgagtctggagtatcgactcccttcgtcctcgcggggaaatcccggggaagtgctgagtctggagtatcgactcccttcgtcctcgcggggaaatcccggggaagtgctgagtctggagtatcgactcccttcgtcctcgcggggaaatcccggggaagtgctgagtctggagtatcgactcccttcgtcctcgcggggaaatcccggggaagtgctgagtctggagtatcgactcccttcctcctcgcggggaaatcccggggaagtgctgagtctggagtatcgactcccttcctcctcgcggggaaatcccggggaagtgctgagtctggagtatcgactcccttcgtcctcgcggggaaatcccggggaagtgctgagtctggagtatcgactcccttcgtcctcgcggggaaatcccggggaagtgctgagtctggagtatcgactcccttcgtcctcgcggggaaatcccggggaagtgctgagtctggagtatcgactcccttcgtcctcgcggggaaatcccggggaagtgctgagtctggagtatcgactcccttcgtcctcgcggggaaatcccggggaagtgctgagtctggagtatcgactcccttcgtcctcgcggggaaatcccggggaagtgctgagtctggagtatcgactcccttcgtcctcgcggggaaatcccggggaagtgctgagtctggagtatcgactcccttcgtcctcgcggggaaatcccggggaagtgctgagtctggagtatcgactcccttcctcctcgcggggaaatcccggggaagtgctgagtctggagtatcgactcccttcctcctcgcggggaaatcccggggaagtgctgagtctggagtatcgactcccttcgtcctcgcggggaaatcccggggaagtgctgagtctggagtatcgactcccttcgtcctcgcggggaaatcccggggaagtgctgagtctggagtatcgactcccttcgtcctcgcggggaaatcccggggaagtgctgagtctggagtatcgactcccttcgtcctcgcggggaaatcccggggaagtgctgagtctggagtatcgactcccttcgtcctcgcggggaaatcccggggaagtgctgagtctggagtatcgactcccttcgtcctcgcggggaaatcccggggaagtgctgagtctggagtatcgactcccttcgtcctcgcggggaaatcccggggaagtgctgagtctggagtatcgactcccttcgtcctcgcggggaaatcccggggaagtgctgagtctggagtatcgactcccttcgtcctcgcggggaaatcccggggaagtgctgagtctggagtatcgactcccttcgtcctcgcggggaaatcccggggaagtgctgagtctggagtatcgactcccttcgtcctcgcggggaaatcccggggaagtgctgagtctggagtatcgactcccttcgtcctcgcggggaaatcccggggaagtgctgagtctggagtatcgactcccttcgtcctcgcggggaaatcccggggaagtgctgagtctggagtatcgactcccttcgtcctcgcggggaaatcccggggaagtgctgagtctggagtatcgactcccttcgtcctcgcggggaaatcccggggaagtgctgagtctggagtatcgactcccttcgtcctcgcggggaaatcccggggaagtgctgagtctggagtatcgactcccttcctcctcgcggggaaatcccggggaagtgctgagtctggagtatcgactcccttcgtcctcgcggggaaatcccggggaagtgctgagtctggagtatcgactcccttcctcctcgcggggaaatcccggggaagtgctgagtctggagtatcgactcccttcctcctcgcggggaaatcccggggaagtgctgagtctggagtatcgactcccttcctcctcgcggggaaatcccggggaagtgctgagtctggagtatcgactcccttcctcctcgcggggaaatcccggggaagtgctgagtctggagtatcgactcccttcgtcctcgcggggaaatcccggggaagtgctgagtctggagtatcgactcccttcgtcctcgcggggaaatcccggggaagtgctgagtctggagtatcgactcccttcctcctcgcggggaaatcacggggaagtgctgagtctggagtatcgactcccttcgtcctcgcggggaaatcccggggaagtgctgagtctggagtatcgactcccttcgtcctcgcggggaaatcccggggaagtgctgagtctggagtatcgactcccttcctcctcgcggggaaatcacggggaagtgctgagtctggagtatcgactcccttcgtcctcgcggggaaatcccggggaagtgctgagtctggagtatcgactcccttcgtcctcgcggggaaatcccggggaagtgctgagtctggagtatcgactcccttcctcctcgcggggaaatcccggggaagtgctgagtctggagtatcgactcccttcgtcctcgcggggaaatcccggggaagtgctgagtctggagtatcgactcccttcgtcctcgcggggaaatcacggggaagtgctgagtctggagtatttattcccttcgtcctcgcggggaaatcacaggaagtggtgagtttggagtatcgattcccttcgtccttgtggggaaatcacggggaagtggtgagtctggagtatttattcccttcgtcctcagcgtatgtgatgggattctgaatgggggctgtgtttatctgggcataaaactcctgaagattggcagcaggagtccacgcagagacctcctggagatgggcgcgctacacgagcttttgaaatgagcaagtttccagagccggcgggattgcgggggcacctgggaaggcaaagtcacctgcacccgctctgcagccccggcctgcgcctctggagggagggccccgggcagtgccagcaggaacgagcctgcctcagagccccaagtctcagtggagctccttccaggctgacatggggctgacggctcccggggccagcagggcgcccgcccgacaccaccacaacccatttcagtgacagataacttcagacaacttatcagagggccttggagggccggaggcagcaacacacacagcctgattctgggagcagcatttccttccaaaaaccttaaatcggataatgagccgggcgcggtggctcttgcctttaataccagaattttgagaggctgaggctgacggatggctcgagcccaggagttggagaccagcctggccaacatagcgaaacctcatctctactaaaaatacaaaaaattagctgggcgtggtggcgcacgcctgtagtcccagctatttgtgaggctgaggtgggaggatcacttgatcccaggaggtggaggttgcagtgagccatgatcacaccactgcactccagcctggatgacagagtgaggccctgtctcaaaaaaaaataaaaggaaagagagacacatcagtcacagatacacacacaacaaatctaaaatagacatgtgaaggcctacacaattaaggaataatattttggaaatgtcaatgattaacgtgcctttagacttaaaaaattctgctgtgtgacttattttctaacacctcagctgcacacccttgagccacagttctgctcactctcagggccacataaggaaggttctcagtcttccccgccctggagctcccagccatttgctctgatcccttctacagcaattctcttgggctccttcaagtgtaagcctcttgccccctagggaaaggaatgcctgaagaatcacacttcgacttccttatctgaaggccatacttgatggatttgaacagatttgcacatttaaattcccaaattaattttttttttttttgagacggagtttcacttttattgcccaggctggagtgcgatggtgcaatcttggctcacggcaacctccgcctcccaggttcaaacagtctcctgcctcagcctcctgagaagttgggattacaagcgtgcgccaccatgcccagctaattttgtatttctattagagacaaggtttctccatgttggtcaggctggtcttgaactcccgacctcaggtgatccaaccgccttggcctcccaaagtgctgggattacaggcgtgagccactgtgcctggccctaaaattcccaaattaattttcacatggtaaaatgttccctggttactaataacaataaataagattatggaaacaaagtagagacgatccgtaagaaataaatagggattaaaaactccaccatatatgaagttcataattaccagcacagcggtgcagggacagcccccagctcctcctcccagggcagcagagcctggcgagtcccgaatccctggtggagctcccctcaagcctcccagcagggctctgtcccctaagccttctgctccttcgctccttcctgctgcactttctgctacttgcacagcaatttctaatagttctcattagaggggcagagcagctgaaaagggtgaagaaaataagagaccaagatggcagggatgttcggaggaggagagaggaggggagacgaggggagacgaggggagacgagcggggaggagggggggaggaggggggagggggaaggggaaagctgcagagaatgaaggtgaggacctggtggaaacctcacagagggtgatttgaatacaacctgatcttccctggcatggagggcaggaggcggccacctgagccccgcacaggtgcccggcaagcccaggcagaggaccaagcagaaggtgctgtctgatccagccgcagaactaaggaacgcctttagcccctgctcccagctgcagaagagttgcccggtgacccaggaagcaggaggaaagggcaggcctgggccagccctgcacggacatcagccctgcacagacatcagccgcgcacggccgccccacagcctgcacacaggtgttcacggcacgtgtgtgggtgtcttgattgacaccacacaactccctgcttttaaagggcacgatcccgtggtttttagtgtattccgagttgagcaaccgttatcacgattgacgcgagcatttccgtccccctgaacgaaacccaccctcctcccccagcccccggcaaccacgagtccactctgtgtctctgtgggtctgcttgtcctggacatttcatggaatgggaccacacggtccttccccttctgtgcctggctgctttcactgaacgtcctgtcttcaaggttcgcccgtgcttagcccgtcacagctctgcccatcttcctggccagatgatatttcatgtcacggatggaacgcattctgtgtatttgttaatcactgatggatgtttgggctgttcccagctttcagttgttgtgaatggtgccgctgtgaagtgtgcacaagttcccatgtgaacacggacagctttgggattctcttgattatttaccaacgggtggggccgcacggcaacaggtttaattaccctaggagccacccggctgcctgcccagggccgtgccttcacacctgcctgcaaagcgcaagcgttaccatgtctctacaccctcgtcagcacttgttactgtctttttggttatatatttgctttgagtcagagaaatatctgtctttaattttgttttgttttgttttatgatggcaaaatgggggtacatgattgtggcaacagttttgagacagttaatatttttggtgtaagaccagacagatgaagaaactgtctctgaagagaagggaccgaggctcctccctgcgtggcagcaaaaggtccacaacacatcactttgggtctcctgtcccaggagattccgcttccgaccaggcaggcttgccccctgagctcatcacagcgtgagtctgggttcacattgcccacactggagcatgggctgtgaaactacaagagaaaaacacctcacagcagagagcccacgtgacaagcacacatgcctgacgggcacgggcgtctctgcagcaggctcaggcagtgaacacgcagacccttgcttcctctaaattcacagggctggccctcaggtatgcgtaacaaaaagaacgccagttcccttttcctggagaaaatacaagaggttccagagccttaatctacaactccagttcaaagtttcaagtagaaggtggagagaggtgggaacattctatttttgaaggtttccctataaaatctgttacatacatatatatgtatgttttttggtggtgttattgttcagtaataccagaaatgcatggtagaaaactttcaactataggagtccaagattaaaaattaagagtagccctaaagccccatgcccatctgtagacgcactctctagaaataaccacagttactaatttcttagttttttgagctagcatttcaactttaaataacagtcccattgctatttcttagatcaacttaaaatcagctgctggctccctgctgtgaaagatgaagggtctggggccacatgggtccccctccactgtcatgtcccacatttcagtggaaaggcttccgagatttccccatttggtgtgaggtcgtgtcccagatttcagtggaaaggtttctgagctttccccattcggtatgaggttagctatggttttgtcatcaacaggctctaccattttgaggtatgttcctctatacccaatctgttgagtttttgtcatgagggatgctgaattgtatcaaatgcttttccagcactgactgaaataatcatggtttttgttctgggttatatccatgtgaccgatcacatttattgatgagcaggtattaaaccatccctgcattcctggatgagtcccacctgtcatgctgaatggtctttctaatgtgctgctggcatctgcttgctggtgtcttgctgaggacttttgtgtctgtgttcatcagagacattggcctttagttttctttttgtgttgtgtccttgtctggtttgggtatcaggtaacactaacctcactgcttgagtttggaagtatccccttctctccatttgtttggattagtttgaatataattggtattagttctttaaatgtttgaatgatccatcagggcctgggctttttctttgctgggagattttttgttctgatttctacgtctgttcaggttctgtttctttatggccccaccttggtaggttgtatgtgtccaggaatttataaaatttctctaggttttctaatgtattggtgtatagctgttcataatagtctctagtgagcctttgtatttctgtgctatcagttataatgtttctttttccatccttgattttatttattggggtcttatcttttttttttcttagtctagctagagctttgtcaattttatcttttcaaaaaaatcagcttttcattgtgttgatcttttgtctcttttgtctcaatttcattcatttctgctcggatctttgttatttctttccttctactaatttgggggttggcttcttgattttccagttccttgtggtgcatcactaggttgtttacttgaagtctttctacttctatgacataggcattcattgctataaatgtccctcttagcactgcttttgctgtatcccataggttttggtatgttatgtttccattttcatttgtttcaagaaattttaaattttccctcttaatttcttccctgacccactggtcattcgggagcatgttgtttaatttccatgtgtttgcatagtttccaaagttcctcttgctatggtttctagtttttttgattgtgttgagaaaagagacttgatataattttgacgttttttaattttttgagattgttttgtgagctaacctatagtctatcctggagaatgttccacttgccaatgagaataatgtgtattctgcagctgttggatgaaatattctgttaatgtttgtcaggctcttttggcctagagtatagtttaactccaatgcttcttgttgatttttctgcctggatgaccttcccgttgctgaaagtggggtgtgaagtcccctactattattgtattacagtctgtctctctctttagatatattaatatttgctttatatatatcggggtgctctggtactgggtgcatatatatttactattgttatatcaccttgctgaattgacctccttttgtagccctcataaggcttatgaaaaacattcagtagttataacaagttattaaaactgataccaacttacctttgattgtaaaaaaaagagacaaaaccatgtacatgttaactctcttctcctcccatattttgaatttttggtgtcacaatttatattttgatattgcctatctcctaactaattgttgtggttattattttattaattgtgtctttcattcttcttacaaaagatagaagtggtttacacaccataattacagtattagtatgacaatcacattagcatccttttcctttggtttgaagaactccctttagggcttcttgtaggacaggtgtggtagtgatgagtctcctcagcttttgtttgtctgagaaagctgccatctctccttcatttctgaatgatagctttgctgggtacactatttttagttgacaattgttttcctttagcactctgaatatatcatcccactccctcctggcctataaggtttctgctgagaagttgctgctaggtatattggatctccccaaaatgttgtttgcttcttttctcttgctgcttttgacatcatctctttgatctttgagagttttttgattatagtatgtcttattcttatttgggttgaatctgattggtgacctttgaccttcctgtacctgaatatttctatctttctccaggttggaaagtttgctgttacttatttgaataggtcttcttctgccttgtttttctcaattccctttttaactctgatagcttgaatatttgttcttttgatgttgtcccatagatcttgtaagctttcttcatttcttttcattttttttcttttttcttctctgtgtattttcaaatactctgtctttgagctcactgattcctccttctatttgatcagttctgctactaatgctctctctttcatttttgcatttcattcactgtatttttctgctctaagatttccatttgattttttctattacttcaatctgttaactttctctgataaatttgtaaattcagtctctgttttcttgaagttcattgagcttcctgaaaacagctattttgaatcctttgtctgagagatcacacatctccatcatcatgttagggcccgtctctcgcaccttattttatccatttcgtaaggtcacatttgcctgaatgttcttggtgcttgtggatgtatgataatgtctgaatcccaagagtcccacagagagacttttgactgtgcataggtacagaattcttgttgttgtgggaaatatgagcaggttaccttcaattccaccactcaataaactaaacatagcattaccatatgatccaccaatttcactcctaggtatatacttaaaagaattgaaaactggtgtgcaaatcaaaacaaacacgaatgttcatagcagcactattcacaatagtccaaaaaggtgaaaacaacccaaatgtccatcaacacatgaacggataaacaaaatgtgatatgtcatttgtggctgccaggagatgggaagtgattacttaaaggatgttcttctggggtgattacaaagtgttgaaactagagagggatgatggctgcacagcattgtaaatgtgctaaatgccactgaatcgtacactttaaaattcttaaaatgctgaatttcatgttatgtgtattttgcaacttaaaaaaaacatgtttacctaagtattgatagaggcaacattggcaaatgtgaatgtgtttagtacacatgcatcacattctacctgacatccttttttggagcaagaaagggtataaataaatacttcttttagagcttatatttaattgtattatttttatttatgcattttgttgggctataatatacactcagtaaatagagctcacacgtttagatatgtgcacagccacacagtcagtaccgagaccgaggcgcgggctcccccgctccagaatctcctctcatatcccgccccacctaaagcttagcactcttcagagttctagagtcaccctattcttacatctcagctcaacagaaccatgcagtatgtacttcatctgctgctctagtagggggttaaaggtgatgctattattctacctttcattttaattcatgaaatgaaataattttataagcggaatttactatttagtaacccatcagtgaagttcacacaggaaagtcaggataaatgcttgattattcccttttatttactgggttttcaaataatgacttggctacctatcatcctccattggtgaataatttggggcttttcagtaattttctgcaattattttttattgagatgtaattcacatatcatacaattcaccctttaagtgtaaacacagtggtttttagtatattcacagagctataaaaccatcaccactaactccagagaattttcatgacccgaaaaagaaaccccatacccattcccactcccatctcccctccctacagtccctggcatccattaatccaccttctatcactacagatttgcctgtcctgaacatctcacagaaatggaatcacacatgtggcctcctgcacctggcttccttgatgcagcctcatgttttctagatttttccatgctgtagtctcagggcttcactccttcctgcggctgattaatggagacttgtttatgtcatgcacacaccttcacatgcgtccactcacactcacaagtcatcaaagagctcaagcagcaggcaaggctcaggagaggcactctgagggacaggatgatgggcccggctgtttccaaaaccaggtggcttggggcgactcatccaacctctccaggcctcagtttccccatctgtaagctgagtggctgggcctcaggtgaccctgggtctctttccaactccacaattctgtgatttgagcaaataagtccaatcctgagttttgtctcactttctaatccagtaaaagttaagctattgtgtttacttgactcagcagagtgtgtgggggcagagcaattatgacataaaaccacgatcctctttggtactacaagctaatcaacgttaatttttcacacaacgactgggaaaatctgcctacaggaagatgccaccctgggtggcactggtgtgccgggagggggtgctctccaggtggccctggcggcatcggtgtgctgggaagggggtgctctctgggtggcctgggtggcatcggtgtgccggaaaaggggtgctctccaggtggccctggcggcatcggtgtgctgggaagggagtgcgcaggcccaccccggcgtgctgcctgggagtccacgttctcgaaaatgcagggtgaccctggcgcaggatcgggtctgagagctgctcaccgacccatgcctcctctagcaaatcgcctctctcacagtcacctcaacagcatctcagccgttgtccgacactgggtgattctgcacgcccggctcggaaccctgtgcattgcccatctgtgagccgacctcctgcctgaagccaccttctcatagcgctcagtactggggaccctggccgggaagtttgcacagagtatgagctctggctgaccatccatgtcctgggtacaactcaccctcctccgtgattcaaactgttccagcctggaataacccgattgctcctatgggaacaactgctcctttccagccaaatgacccatttcccaaacgccttccctttccattctctaaatactgtagcaccacactgactagcgtgcgggtctccaccacagttatgaccacccttccctcctcgtcccccaaagcactcaacagctctccagcacccaccgaatgaagcactgacccttcagccaggctctggagcccctacaagcaacgtccgtctgtgtccaggccgatctcgctgctccctcggacgtactcgccctacaccccagccaaacgcactccgtgtttgccaacatgtgcgcctttgaacatgcgttctctccgcctgcagtgccctcctctgtgtctcaatccttcccgtgcaccaggccactctgagtctgctcctccacgaggctcccagatcacccccaaagccaccacacctgtccctgagtgttcatggcgtcacagttgtcactgaggctgtggcacttccccttccaccaggcacagcagctatagttgtgtgcacacatcccctcctgaaccgagcagttctccgcagatatgggctgaccaaatgagcatctttagagctaactgggaactgtccaggggcgagaggcctgggtggtcttagtactgtcactcatctctgcttcagttaacttgagcaataaaataccctgcagataaggtcagacggcaggtgccagtgtgtcctgaaaagccgcaagtctacaagcagccggcaacctgcccggctatgctgtgtgcatccccacagggcgccaggagcaaacacccaaacacccatcctattcccgattcagggcaatggtccaaaagacgccatcgctgctacatgagacagaacgtcacagcgaagaggcaggcagcaaatagatgcctcagggcgtttctcaaagaaaggcatgatgcagcctgaaaaccccaccagaagtgtcttcctgaagcatctaaacgccctctgagttccttctcccagaagagagcagttacatgaagcagcaatcacagaacggaagtgcccggccacaaaggctgccgtccttctcctcgtcccagtccatcttacagaatggctcccctctgcagggccacacagttgcccgggatgcagacgctgagacgggagctgatgtgcaggtttctagggcaagaggcgggagagagtgggcagccgacaggacgggggacgcagcctatgcggagtggatgcctcaggaaggccctgcctgggtctcaaggccccaccatggggtcttgtctcattcgtgaccctgtgcacgccgtgcagcagtgcagacggccggggccccaccacagggggtccagggagaccaccagcgagagagtggatacccctgggaacaaagcgggcccagatggagacctcagacaaaggcagctctcagccctcagctgagcacgccgaggggctacagcccccatccaggcccaggccggctgccagcacagagaggcccaagtggaccccagggccaaaaccccaagtctgggggctgcaggggagcacggcacctggctaaagacacagcacacagggctacagcgggcagcctgtggtcaacagctcatcagcgacgagccaggcccagccaagacagcaggaaaaaaaatcaaacgggaggccatgccctctaccctgggggcagagctgagaggacagagaacaggcggacaaggcaacagggacccaggtgcgggtcagcaggcgctaaggatcccagggtctgcgtgcccagccaggcctcacaccagcgacatccaggggtctgcaccagagccatgggggaacagagacacgaacaggtgaaagttcagcagggctgcaggcgcccaggccagccctgaggcagagacgtgaacaggcgaaagtgcagcagggctgcagccctgagacctggtgggctggggtcaggacgttaagggtgtgtgtgtgtggaatggggctggccggccccctcccaacaagatgtaggaaaccccatggccgggatgaggggaggcaggaagggcaaggggcatggaggccggctgagagtccagaggagagaccagcccagacccagggaagaaggaaccccgtgggatgtcccagacagcaaggagagaggcagtggaaggcacaagggcgggagaaagacctcagaagggatttaaagaatgaagaaataaaagctctgaaatttattttaacagagctttgggctacactctaacctttgcttcagcagcacaagaaaaagaggctgcacagagtggccccgcaggccagaaggcagcaacgcccactgatgccggaccacagcagtcggggcccggccacccgagccccccagaccacagcagtcggggcccggccacccgagccccccagaccacagcagtcggggcccggccacccgagccccccagaccacagcagtcggggcccggccacccgagccccccagaccacagcagtcggggcccggccacccgagccccccagaccacagcagtcggggcccggccacccgagccccccagaccacagcagtcggggcccggccacccgagccccccagaccacccctccttttctcaaggtcagaacagcagtgaaggtcagagccagaagcacagcagacgctcccaagccacaggcagctgctgaggcctgagccggggacgaagctcctccctgcatggggacacgcggggctgcagccactcccaggcctccatcacacagggacggtacagaaatagcgtgtcttgtgggtgggtgctgggtcggggagggagggcgactgcctctccctttccaggcacatttggattccccggggtgtccgggaatgactcaggcctctggtcagcgcttctcagacctgtgttcacacagcgcgtctccctcctttccctccctgcctgggacctaagtacggctctgtttaaaactggcccaaatgcagggtcagcgcctgagatgcagcccccacagcagcccccccacagcccccccacagcccccccagcccccccacagccccccacagcagcccccccacagcccccacagcagcccccccacagcccccacagcagcccccccacagccccccacagcagcccccccacagccccccacagcagcccccccacagccccccacagcagcccccccacagccccccacagcagcccccccacagcccccccacagcagcccccccacagccccccacagcagcccccccacagccccccacagcagccccccgtagcccccaccccacagcccccccacagcccccctgcagccccccacagcccccacatgctccactcgatgctcacacgcacagttttatctccttaactctaatgctgtttaaaaactattgtcctaatcaagcaagaaaaactgcaggtttgcaaagcgtctgctctggaagagcggcaggccagggtggagagaccacactgccacacctgaacacagcaaggctttccaaactctgcgcaataggaagacgccgaatggtaaatggaggagctcgcaggagacgcagctctgactctgccccgccccggcccgcggtgctgagggcgcgccgatgtggatgcctctgtgccagcaccagcggctgcccctcggccccgaccctccccactgcgtcctggggcaccctcagagcttcggccatggggtgcacagcaccctccaagcattctgaaaggagattttagactcttgtgcgcaacacccaggagccgcccgcctgcaaagcacttggtcagcgtggcctggaaaggggaggaaggtcctggaggcagggctctgtcaggcggaggacgtgatgctcagagcagccagggacccccgtctgggcccagtccccctgcgctgcgccccacggctggctggaagtttgttctggaaaccacctccaagacaagtgcagcagccggccctagcagttgggaagaaggcggctgacgtggcttccatggaaaatgccagaaagcacatcccacaccaggacacctgggcaaacagcctcaactcggaaaatcccaggctggttcggtctctctgctgcccggacctgtttaaatgtccagccgtttgggaactgtgtacccttcgagaaacactccaaggccccagggacaccggaagccgtggagcccgggccccatgcgtctgtgttctcgccacctggagaggctgctagtgactgacaggtggactgcggggcctcaactgctactgagaatgccacacaattttaaaaactcagaaattgcttatttttagaattttccatttaacatttttggaccacggctgaccacatgtgactgaaaccgcaggtgagggggtgagcgtcagcctgtgtcaggctggacacacctgggggcctgaggagcagccgggggtgtagggacaggggctccccacacccacatggatggcctgtgcagtcaccagcaaggcgggttctgcaggcctgtgtcccggccaacggcagccaccaaacctctctgcacttctgttacagacaagtcagagaggcccagaaaaagggaccaaaattgaagaaccagggaatttcagagggaagggaagggaaaatccaactggcaagcagacccctgggccatgtgctaggaaggggttctgcccagcgaggtctacccccaaccaggacgggtaggcagtggccccagcaccccctgcacccccacggcccaccaggggactgcacctctacaggaaggacagaggcaggaggaacccctcagggctggagagttgccagccactgcccgtgctgggccccgccctgagacagtgtctaagcaccaccccatggacaatccgaacctggaggggcctgatcccggccctgacccatgccaggggccccagccggcactgcacgccggagatccgggctttccttggcaaacacgcttggctgtcctcgtttccaagtcagccctgttggtaaaacagtgaagccagcagtgaaatacacgaaacccgaacagccccggagttggaactggaagcttccagggaagacggcagtgtctaagtgtctcccttaactgctgtggctgcacccggggtcctgggggtgagaggcttgtgggccctgaagtcacctgctggattccaaagtgggccatgccaatgccgtctggaaaacatacggaaaatgtcattcccaggaaatgtggcacatcattcaccctggaccacggcacaaggaaatcaactcaccctggaccatggcataaagacagacggggccctctcatcagaaagtggggagcgggggtctcagtttccaaggaccccacaagcgacgtctacagggtgaaagaccccgtgcccagcaccgaaggacctgcccgacacacagtccccagccttgagcggagacccccagactgcatacaactgtgcaaatgcacttgacctccctttggttgtgagtcacaggactgtcttaaaaagagtgtcttcttccagtgccagaaaacagagagacgggggctgtgaagcacaggatccacagcgggcgggtggtaggcgggcagcaggtgggcggtaggcgggcagtgggcaggcagcgggctgagaagcagagcagagccccagccaggagcccagagggcggcagagcagcgggcaccgaaccagactgtcggacctgtgctgggggagagcgagagtgaaggaggaagagagacggagacagagagacggtgagagggagagggacagagagggagtgagagcgcttcccacaagaagaaccaagctcaggtcccaccctcccccagagcctggtgcagctgcgtgggacgggcaggaggtgcgaggggccctgtctctgacgttttgtgccagcactgccctctacacacaaactctcaggaaccatcacgaccccattttgcaggagaagatgctgaggcccagggcggtgagcaggccacatggccggtggcaggggcagaagtgggactgcagcccaccaggtggtgtcacagccaaggctgcggcgtcactgcctgtcctgcctcacctacccccagggcgacgctcccgactaaaccacctctgtcctatggtctccggggcttcctgacccctggggagggcggcaaagcctgtggaggctggagtcctgtgggctggggacgacgggaagaccaagtcgtctgtataatcgccgtgggcgcagccggcagtgccacccacccacccacaaggcaacacggggcctgagtccagccccaggcaggtgggctcccagagttggggtccctgaaccaaaccacccctgctgctcgctcacccctaagagtgaggctgcgatgctgtcagccaaggacactcacgtgggcagctccggtgcagccggccccagggggagaaatgcagctgtggctgtcgtggaggtggctgtggccaatggccgtgactgttgctgtgtctggcagagaagccaggtgcactggctctgtgcttcaaggagacctagagggtctcccccaagtccaccggaaatgtgtgcacattcgccctaccccactgtgtacctggcccaagtcgggagagatgcccaagagaccacagccagcctcagcacagtgaaggctgccctggcccttcggggtgtctgggaagagcctggcattctctctggggtagctctcacccttgcaaagcacagagaacaccaagagccccagacacacactacatccaaagggaaggtcgggcggctcccagacgggggacggggggacgggggacacagaaccaagccgccgaggagcacctgacaccggagcccgagtctcggctcagcaccaccacccccgatgcgtccacactgccacggccacagacacccacccccgatgcgtccatgctgccacagccacggacacccacccccgatgcgtccacactgccgccgaccacagacacccacccctgatgcgttcacactgcccccggccacagacacccacccctgatgacaccggagcccgagtctcggctcagcaccaccacccccgatgcgtccacactgccacggccacagacacccacccccgatgcgtccatgctgccacagccacggacacccacccccgatgcgtccacactgccgccgaccacagacacccacccctgatgcgttcacactgcccccggccacagacacccacccctgatgcgtccacactgccccggccacggacacccacccccgatgcgtccacgctgccacagccacggacacccacccccgatgcgtccacactgccgccggccacagacacccacccctgatgcgttcacactgcccccggccacagacacccacccccgatgcgtccatgctgccacggccacggacacccacccccgatgcgtccacgctgtcacggccacggacacccacccctgatgcgtccacactgccacggccacggacacccacccctgatgcgtccacactgccctggccacagacacccacccccgatgcgtccacgctgccacggccacggacacccacccctgatgcgtccacactgccacggccacggacacccacccctgatgcgtccacgctgtccccggccacggacacccacccccgatgcgtccacactgccgccggccacggacacccacccccgatgcgtccacactgccccagccacagacacccactggtgatgcggcctgagatgccaccacaccctggccagaggctcagtccacagcccataccccatgacctgtacccacaaaacctgcagctagcaagaaccggcctctgcctgaccctgtcatcaggggcgggaactccggtggcgggcacacccagcgcaattacagggcgagcatccgatgccctcctagtgggccggccacaaagcctctcatcagccaccccgtggagaaccacagccaaaagcctgaaccgcacaagatttggcgtctcaatggcaccttcagaataggagaaaatagcaaatcgaaactttggttttccgttccttatttacgactcaggacaagactgcctgagagagcagcagactccaagtgcaggctgcagtgcagtgtctgttctggagggggggctaccgcctccccagcccacacatgctcacccctccctccccacacacacgttcacaccctccccacacacgctacccactcccctccccacacacgttcgccccctcccctccccacacacgttcacctgagcattgcccacaccagcgtcagcagccctcacaggaagggtggcccccaggctctcggccccccgagcccagcttccatctcgggccataaacaccctttggccaattggcgcaccctcctccaacagactatgacctccccaagccccagaatccctggagatggagagcacgcctggcccccagtcagggcaggtagtctccagggccaagccgtcacctcagaagggtgggtggggctctccccaggaggagggcaggtccgggactgggaggacgacccccacgcaagcccccaccctgcccttgggctccagcctcatccccagcagccgccagccctctgagatgccagggtgccatggaccctgcactgaggggtgctcactgggcagccgtgtgaccagcaagcagaggcaggttcacagcagcagtggagctctccagaggcaactccaccaaggggtgccgcagagctctgtacccccaaatttatgaggagcccggctttgggaggggacacctaggggaaaagggctcaggaggcctcagccaaggaggagcagcactggcagcccccctcctccagcacggggacagggaccaccggcatcgaagctcctcacctgcctcctgcctgacaaggccacaggcacatccggggccagcactgaccagacgctccctccgcctcgcttcacccagcctgaggctggacgggaggcactggcgtctgcagcacatccacagcattccagaaacgacagaaaccaggccaggctctgagcagcccgtccgttgtcctgacacctgaccatgacggcatatttacggtgtcttctcaatctttgaaaaatatttttaagagaacatgagaacaaatcaatattccagtggcctaaggaagtcagctagctgtgaaactattacggtaagctacacagtgggggaatcagcgtgggggaaaggaagcgggcattccacagtgcaagactctgacacacagagcgtcttgcacccgccctgagctgagcagtcctgaccctaaagagctgccattcctctggggccacggcaggaaatcgcaggcactgagtgggaggaagaggatgaccgggtgttgggatgggtgcacatcgcagagcggcacacggcagcctccggatgggcgcatggcagagcggcacacggcctctgctgtcttttccgatgaactttcaataatacatagaaacatatgggtttaatgtttcctgtgtgtgtttacagatgtgtgtttaatattgaatatgtgtgcgcgcaccgtatctccacggagcaaaataagaatggagagaaactaacgcaaagaaagacgctaacgtgccaggctttcagtggggacaacttctcattcttgaaaacttaaaattagcttttccaaaacatctataaagcaacagaaatgcttacaaatttaacagcatttgagattattgtaaataaaaatgataggtctaatttttcttttgccaacatttccttcgtttatattgacagtcaactcattacgtgtaacaataatggcaatttttcctaatgaagtttaaacataaaatataaaacaatgtaattcggagctttgtaaataaatgcccattttacttagcgtaggtgtagaaattcacacccaagtcccacttagaacacgcttcccgctccggagcataagcccctggcgtggggaggggttgggctctgtctgaactgatcaccaccactgctttattaattgtttttggcttaacacctgaaccagctgggtgcaaactatgacacacattacaaaaccacctgtccatcctccaggcacatggaaggcacacggcccacagaaaccaaactatatgctgcgtcccatttagaaagctctgcgtatgtttaaaattaaaagtcttataaggaaactatttttctgtattttaaaatgttcttaattacaaagaaatagatattcattctagccagttaagtctccaggtagaaaaagttaactcttttccctccctcagccaggcccccccagagccacatctggcaaggacggcttggtgtgcacgcccacacctcctctctcgtgcacggccacatctggatcagatgtgcaggcatttcaacatggcagtctccatccagccacggtctgcggacagcgttcaggctccagccttgaccctgggcaccttgaccctcacggggtacgtggcctgtgtgtctgcctttgtgtcctggtcctcgcaggggacaggcctgtgtgtcccacgttcgtgtcctggtcttcgcaggggatgtggcctgtgtgtccctccttcgtatcctgacccttgcgggggacgggcctgtgtgtccctccttcgtgtcctgaccctcgcgggggacgggcctgtgtgtcctgccttcgtgcaccctgacaccatgggtctgattttcccacgctggaggtctgcttctgaacagctgcatctcctcctgcaggggaagctgtctgttcacccaggtgcctgtcctgtctgagggctgggctcttcctacccaagggttgggggctggcctgtccctcatgacccaggcaggcggccagggctccccggaactccaggctgctgcgggtgtctgctctgccctgggtgaggctctagaagattcctgtggaagcgactgtgtctaggggagcccattccccagtttaaaggacgtccccccccatggctatccacatgcccagtcctctcaggaagttccaggctgccaggatcagaggaagcagaagccgctgtccttcagcaggaccctgcaaaagcaggatgaatcagcggggccattcagaacaaggttcaaattactgctgcacttttcagaatggagccaggctcagtgtttcagaaccagaggctgacgcggatcagctcgcacccagcctgggacctgagccagcccctgagtgccactctccacggccgcctcagagggtaagcctctccaagcctgcttcctcgccggcatggtgggggtggccctgccatcccctaggggctctgcgggatcccctgaacactacgaaaaacctgagccccactcctggccactgggtaaggacctctccgagcctttctccttcccattcactcccacccccaggcaggagcgaccagtgctgagaagtcctatcatcccacaacccatcatcctccgtcatcccctgtccgtcaccccgcagctgtcatcccccatcaccccgtgtctgtcaccccgcgtctgtcaccccatgtctgtcaccctgcatccgtcaccccgtgtctgtcatccccgtccgtcaccccatgtctgtcaccctgaaaccatcaccccatctgtcaccccacatccgtcatcccgtgtccatcaccccgcgtccatcacccccatccgtcaccccatgtccgtcaccccatccatcaccccgcgtccatcatcccccatccatcaccccccgtccgtcatcctccgtccatcaccccacgtccatgatcccccgtccgtcaccccgcatccatcaccccatgtccatcaccccacgtccatcaccccatgtccattatcccctgtctgtcaccccgcgtccgccatccacatcccatcaccaggtgctgttttcttggtgctagagcaaggtgggattcacaccttgtgtgcacagcttctgagtcactgggcggctgggcacagcctaactcaggagcagggacccacggagggtgtggcgacgacacagccctcagcttgctctccaggagttcttctgatacctcgaggacactctggaccctgtgtctgggtcccagcccttccgtaacaacgtggctcctctgaatcagtcacaaggaagatccaacttaacacagagagtttttcccaaacagcagaactggcagcaacacaggcatcctgcagttcagtccactgcatgcagcgtgcaggtgtcggagggcgaggctgccgtgggctcccggcggacggtggcagggcaggcccaggtctctatcacagcaaggcctctccactcggccccctccacctgtttacaacctcaagctgggtcaaaaccccaggggtactcagagggagtgtttctccccaactggattccttaagccagagggcaggcggcagggtcctggcctgacaaacacacacgggcccccgaacacgaccggctccgtgaccgtcacaggacgttcaggtggcttcattttcagtccacgcctctggtgccagggtcttgcttggcacttgtgtgaacggcgaccacgtgaagcctctgtcttgagaaaagtgtaaacagcagctgcctttcaaggcactgaggccttcctcgaactcagctcgtttgtgctgcgtggttcccagtccaaaccctcctgttcacagcctcctcttgcctcaagcatcttagagctccactccaatccacaccccagctgccttttacaaaatcccaagccaatgacagcttgaaaataaagtgagaaaaacaccgaccaacatttactcagcacctacggtgggctgcggacgttgacacagggtcctctctaatcttccatacagatcagccatgagggccgcggagaggagaaaagcacagctgagctgttttctcttaaagcaacataaacgtcaaagcaaaactggagcccaggactctctgacttaagctcatcctccttctgctccatcccggctgtgcacacctggagaccaggccctcgagcctccaaacgccgtgagcagcctcctcctgctgtggcttccaaagagacgtcaccagaggcggggctggcgcagggccacgaggcaggcgactgggtctctttgaccgggggtggcctcgcggcggcacgagactcagcatcgtgtgggtctagctctgggaatcgaggcagcccccagaacacccttggggcgcaacttcccggtgaacgtcccgtctcctcagccacccacagatgctgccacagctgcaccctcagggcaacgagcgtctggcggagcccagtgagagccgtgaaacacagacctcagggccaggccctctccccatcacagaaacctgaccagtcacaggtggctgcagcctgggtggttggtaaaagaaaaattattccttctataaccagaaaaaaatagtgaatcaacagacacagaaatgctcagaataaaacaaaaaatctaagtcagtgggacagaattcagcagtccccaggggggcctggaagctggacccctgctctgggtctacgggcttacatggctgccaggaccagggagagacagacccgggcccctgaccataccctgtgctgtaacgcctgcaaggtagattttaagtaatttaaaaattatcaaaaggataacatttcatgcctgtgaacattacgtgcaactcaaatctcagtgtctgaaataaggtgaaatggatacagtccggctcactggacggcaccgtgcctgcggctgcttccctgcacagctgcatgacccctggccctacacaggacaggttctgcgcactcggccgccaccttccttacacggcttctcaggaaagcagcaggcagctgtggcccagcgtgagccggcaaagcacttccctcccagagccccgtttcctcatcagcaacaaacacaacaagcttcctcccctggctgctgtgaggaccgacagcccctcctggcacctgcacagggcatgacacgcacatcacagccgccttcacccgctcagcctcccgcgtccccacagcccggaccggagcctcagagcaccaggacacacccatccggacaccggcaggtttgacaccacagactgtgcttggctggggagtgagaatcctcctgagagagccacggtgtcccaggtcgggggcagcagagtgagggtctggccgtgggccccggtcgggggctgagccacgctctggtcaggaaagacatcgccagacacctgtcataatccagggctgctcaaagtaaaaaaaaaaaaaacctaaaactgcaacatggaacggcacaaacgagctgcaggccgagttctaacgggctgagcctcaaaccagctgcaggccgagttctaacgggctgagccacaaagagctgcaggccgagttctaacgggctgagcctcaaaccagctgcaggccgagttctaacgggctgagccacaaacgagctgcaggccgagttctaacgggctgagcctcaaaccagctgcaggccgagttctaacgggctgagccacaaacgagctgcaggcggagttctaaggagctgagcctcaaaccagctgcagaccgagttctaacgggctgagccacaaacgagctgcaggccgagttctaacgggctgagcctcaaaccagctgcaggccgagttctaacgggctgagccacaaacgagctgcaggcggagttctaaggagctgagcctcaaaccagctgcagaccgagttctaacgggctgagcctcaaacgagctgcaggccgagttctaacgggctgagcctcaaacgagctgcaggccgagttctaacgggctgagcctcaaacgagctgcaggccgagttctaacgggctgagcctcaaacgagctgcaggccgagttctaacgggctgagcctctaaggagggaaacgtcacttcctgcctcacacagagcccagcgtctccatgtccactgatagccttggtatttgcaactatgtccatgaccatctctgtttctccaaaacagcctctagctacataaactgtttagaaaacctcatgcgtaaagcagagtatgtcaaacctccatctgtggtcaggagttaggacatccccagctgcaatttgagcaaagacggcgcttccagaggatcatcggatcctgtgtcttggttggggttggggcccatcaacttaaaatagcttctgtttatgctggtgaaggaggcacagacttcaccctatctaattccaaggaacaggcgagggtgggagctgtagcggaagagacaaaagcaaaaggcagattcgcccctttgtgtggtcccgtaagtgacactgtccctccctctccctggaaacagcagcccccaggcaccccccccagcaactgggacaagggcacaccaggctaatttttaatcagatggatttagtgatagcaaataaagagaaggagaacaaaaccctcagccaggctattgtgaatgggtgttaccaaaaaatggcattagcagggcaccaggggccaggccagctccaggcagccccgcatctgctcagcaatccccggagtcttctagggggcctggggcagccggaacctggccgggtggaggatttctaccacgagaaagtcagggccctccccgaaggagcagaagctctgcgggtgactgtttgggaagctggtctgctcctgatactctgcaggaagagaatcacactctttagaccggggtctcagatttcagccggacgggaactctctgcagggccggtggaaagagatcgccagccccagctctgtaggggtgcggcctgcctcgagcacttcacacgcgtgcccggggatgctggtgctgcaggtatggggaccccgctaggagagccccgggttaagggttggtaactggagaatggggtgggggtatgccagctctccctgcttgccctggtcccacacactcaggcctgtgtggccagcgtggtcctcctttcccacagccaaggtgccccgactgccagcgtccactccccgtggggccgcagggtacaccaacatctgaggcagaggcaccgctgtgggctcatctctcagctcaaagggtttccaagagaatcctcagcaaaaaagcaacactcgccgttcagagagtgaatgagaggccagcagggggctgggaaggtgcttagctcagggagggctggagggtgggactaggaggcactaaaggcctgggggctcagagaaaggcccagcccatcccagcagaggccgaccaggactccagagcccgtggaggccctgccatgcacgggaagcctttcccgacttgggggcaggagctggagggctgggatgatcctaaggggatgctcggccataagccacatgccaagtccagagcccaacagctgctgtacctcctgggctgtttccacggatgaggcttctctgaatgtaagtttgtctgctcagccacaccggcctcctcctggcacatcgtctctcacaggcacctccttccatggagactgggggcctcagacggctcttcccgacagggccctgcacttgggcagatgcacctgtggcttgagctcagcacagcacatagtggctggcaaggaacggaaggagaattggagaaatgtatctaaaatgtcaagcagacctctgctacactcactgggaagaaccatgttgcttctgacgaatttcttaaaaagagagaaagatgccaatgagaaaaccagaggggacaaatgctacccgggaatgtaaaacagttgccatcagagactggctggctcacattgtgtccaccaatccacccaccacggcgagtgatgtccgtacagctcacaccgcatccatcaatccacccaccacggcgagtgatgtccgtacagctcacaccgcgtccatcagtccacccaccatggcgagtgatgtccgtacagctcacaccgcgtccatcagtccacccaccatggcgagtgatgtccgtacagctcacaccgcgtccatcagtccacccaccatggcgagtgatgtccgtacagctcacaccgcgtccatcagtccacccaccatggcgagtgatgtccgtacagctcacaccgcgtccatcagtccacccaccatggcgagtgatgtccgtacagctcacaccgcgtccatcagtccacccaccatggcgagtgatgtccgtacagctcacaccgcgtccatcagtccacccaccatggcgagtgatgtccgtacagctcacaccgcgtccatcagtccacccaccatggcgagtgatgtccgtatagctcacaccgcatccatcaatccacccaccacagcaagtgtctgcgatgtctgtagtgtctgcgatgtctgtagtatctgcaatgtccatgcagctctcaccatgtccatcaatccaccccaccacggtgagcgtctgcgatgtccgtgcaggggagagagacctggcctatcctcagcacagcccatgtgacgttagaaaggcaaccgcaaattcagctgcggagtgcaaaacgaatttcctcctgtcacacgctaactttctgttctggatttcctggggtttcctttattagacttgagtccagaactcctctagaaacattctctgggatatcttgacctggcacgcagaggggtgaaggaacggggacacggatggatggagggagatgaactaatcagcaaatgctccttgcacatttcctagctctgtcagccaaagtgaggtctgaccacaaaagctacccattcacttgctaaatggtgcaaaatgggcccagaccctcattttacctttacttaaataacagcatattctcgtctggtctttaaaccacacaggccaaaatgagttgagcactatcacatatttaattgactcgtaaaagcaacttgtttttcttcatccttcgccgacctttgtttatgggtaacccttgataacatgtgggcagggtttcagtgtaaacccgagggcaggttaaacacgctccctccaaagcttacttggctttgatttttcaaccacccgccctcatgtgcagggacagggcagagtcgtgaccaacagtggaaagacccatagctcccagctccagggacgacgcgggggtgctaagctggtaagctgggaaattcccgggcacgacccctggccgtgggtgaaagcacccccagccccacccccagctgtgagatgctgcaggttccccagccccacccccagctgtgagatgctgcaggttccccagccccacccccagctgtgagatgctgcaggttccccagccccacccccagctgtgagatgctgcaggtcccggcaggagaaggcttctccacagagaggccgctgaacaaggcacagggccaggtctggccgtgtaaaaatacttggaacccatggggggctttgtgtgtggtgtcatcggcagcttccattatgtccagcggtaacatgtttacggtccctgtgccgccgtgcggtagcagttttcccgagtgtctcctggctgggacggctggtgaggatgtgagttcaatagatgaacaccccaccttggtgacacagaggctggacagtcacaccgacccttggcccgggcgaggccacgtgtcccacaaaacataaggcttgggttagtgtcgggcacgcgggggaggtgcctgcctgcgtgaagactggtcacaagacaacttcccagtttagaaaatggttaactgattcattaatactcacttcctgtcgcaagagactcatgccctagagataaagccgtcggaggcagagtgcaggcctcgaagcagctggtcatgtccacgccctctgcaggcctcgtgtccccctcgctgtcgcctgccgatttggtggctcctctcataacacacagcctcctgtgtatgtttttaccctacaaacgctctctaaccggtccagaggtcagaaacagccgcagtctcctacctctattgcttctcaagggaaaagcacagcctggaatgatgaggagcccccacgccttctcagtctcctgtaacgacgttgctacagatgtatgtgtttgtgtgaagctgtatttaaatgtgagattattcttcttggttaatattttactttctgtcataaccagcaggcttaaagaagaaacccaaacgctctgtgaatgggacatgtgctcagaggcgtctgcagttgaggcgggtgacgttctggggtccctgggaagttgtcatcaccctgctgacatgagtgtggatgttgaggcctggagggtgacaggtcacacagccagagcctggcagcagcgcaggggcggaaccccgggtcccctgtgggcctgtgccctctcggccagccttgcaacgcgcagctaacgctcttcaagaaaacattctctggaggaatcctgctggtcctgaagtttttggccttgagaaggtcatcacagacacccctcccctcgggccaggcctgctgtcttgtctaaggggccctattttatctgaggtgatttgcaactctgaaacacacatacataaaatagaaataccgtcctcactattaacctagagacccccatccctacccctccctatgaatgctttttcataaacatgccgcattctgaggaatccgaaagactccagcgtaggacagaccgctgttccaagccactgggaaaggggaaactggtgactgagcggcgcccgtcagagccattaaaacgtgagggaaaactgcaccttacggcacacgaacccttagaagaggcaaaacactactgagttaatgcttaatttatttgtaatgataaaagtttttatcactttaaataaagttatttgaaaaaagttattcaatggcagcctaataattttgcttaatgaaaaattaactctgcaaatacagtttccactattcacatggagcctgcaggtttggagaatcctctgcatcagtgtgggtgagcacgtgtgtgaggggtgcacgtgtgtgaggggtgcacgtgtgtgaagggtgcacgtgtgtgaggggtgcatgtgtgtgaagagagcacgtgtgtgaggggtgcatcagtgtgggtgtgcacgtgtgtgaggggtgcacatgtatgaggggtgcacgtgtgtgaggggtgcacgtgtgtgaggggtgagcacgtgtgtgaggggagcacgtgtgtgaggggtgcacgtgtgtgaggggagcacgtgtgtgagggatgcacatgtgtgaggggtgcacgtgtgtgaggggtgcacgtgtgagaggggtgcacgtgtgtgaggggtgcatgtgtgtgggggtgcacgtgtgtgagggatgcatgtgtgtgaggagagcacgtgtgtgagggatgcatgtgtgtgaggagagcacgtgtgtgaggggtgcacgtgtgtgacagatgcatgtgtgtgaggagagcacgtgtgtgaggggtgcacgtgtgtgaggggtgcatgtgtgtgaggggtgcacgtgtgtgagggatgcacgtgtgtgaggggtgcatgtgtgtgaggagagcacgtgtgtgaggggtgcacgtgtgtgacagatgcatgtgtgtgaggagagcacgtgtgtgaggggtgcacgtgtgtgaggggagcacgtgtgtgaggggagcacgtctgtgaggggtgcatgcaatgctcctgtatgcacatctgtgggtgagcacgtgcgtgaggggtgcacatctgtgggtgagcacgtgcgtgaggggtgcacatctgtgggtgagcatgtgcgtgaggggtgcacatgtgtgaggggagcacgtgtgtgaggggtgcatgcaatgcttctgtatgcacatctgtgggtgagcacgtgtgtgaggggtgcacgtgtctgaggggtgcatgtgtgtgaggggtgcacgtgtgtgagggatgcacgtgtgtgaggggtgcatgtgtgtgaggggtgcacgtgtgtgagggatgcatgtgtgtgaggagagcacgtgtgtgagggatgcacgtgtgtgagagcacgtgtgtgaggagagcacgtgtgtgaggggtgcatgtgtgtgaggggtgcacgtgtgtgaggggtgcatgcaatgctcctgtatgcacatctgtgggtgagcacgtgtgtgaggggtgcacgtgtgtgaggggtgcatgcacacacacctgtaagcatgtgtgtgaggggtgcacgtgtgaggggtgcatgcacacgcacctgtgtgcacatgtggatgttgccgtgtgcacgtgtgcacaccaagtgtccgtgagtgcacgggaacagccgtttagaagtgccttaatcttcccgagcacaatagtagctcacctctgcaaggaggctgaaaattctcattatgagtctcataaatacgtggccacgttcatgggtttgtcttatttatcccttactctataataacttggaaggcacagccaatatttcccttatatcctgggacagccccagttcatggctcccgacgactgcagctgcctcctgggaaccccaggggggcaaactcaggcccacccccgcctgtgtgactcaaaccccccagccaagtgcctgtgggaggacattttagtgggtggggaagcttctgaaaaatcactttactctaactaatatttgtaattaacacatcaagtaaaactaaaagcttttgccttgccgttgttgccttttggtgggtgacctcaaaaagtcatccatctcacactgactctatcacatcccaactctagccccaaatcctaataaacacaccagttaagaatgcatggcacatttttacaagcctcacaactttctgattagatgcatagaaatgtcccaaatatttctgaaatattttatttgaaaaccgatgtcaccgccacttttaagccacaggcattacactaaaatctggactagcgtctaagcaagtggcagcttttgagctccgcacactccgtgtgaccatccacaaatctatgatgaattattaaccagaccaggctagcccactgcctggccttctctgctgaaagtcagcagctgtatcctgcctgaaaaacaccagcattcttgtgttcataaaacccgctggttccagtgcagctacccagagggaagccttgggtgtgggcagcgacaggggtgtgggtgccaccgtggggtcccccagaaggaaaccaggggagcacagaactaaatggtcacccatgacaatgaatcgtgatctggtgggaagaaatcaaagtgcttttatttggagatgaaattggctgcctgcccctccctctccaccccccgctttcctcctgacccacccaccccagctcttttccccggcctgggaagggcacatggagggcagaaagggcttccctaaagaaaacacagaaatacactttataaagcaaaataaacttaaaaaaaggcacttagcaaaaatgtagtgagaagtgttttttcctttccagtctttcattttcactcagcatttccataaacacattcttgggtccaaatgctgagaaactctttctctaaatactggaggagcgctaaatggagcaggaaatgatggagagagaaaggaatgccactgattccagacggatgggaccagctggggaattcaggaagcggtacggaggtcccggagacaactgctcacgcctctgaggggccgatcgctcaggatcccccagcagcagcgagagaaccagcagggcccccctcccctctccagccaggcgtcgatcagtgcccccctcccctctccagccaggcgtcgatcagggcccctccctctctccagccaggtgtcgatcaagtcctcaccttctctccagccaggcgtcgatcagggcccctccctctctccagccaggcgtcgatcaagtcccccccttctctccagccaggcgtcgatcagggccccccctccctctctccagccaggcgtcgatcagggccccccctccctctctccagccaggcgtcgatcagcgcccccctcccctctccagccaggcgtcgatcagggcccctccctctctccagccaggcgtcgatcaagtcccccccttctctccagccaggcgtcgatcagggcccctccctctctccagccaggcgtcgatcagggcccccctcccctctccagccaggcgtcgatcagggccctccctcctctctccagccaggcgtccatcagggcccctccctctctccagccaggcgtcgatcagggccccccctcctctctccagccagacgtcggtcagggcccctccctctctccagccaggcgtcgatcagggcccctccctctctccagccaggcgtcgatcagggcccccctcccctctccagccaggcgtcgatcagggcccccctcccctctccagccaggcgtcgatcagggccctccctcctctctccagccaggcgtcgatcagggcccctccctctctccagccaggcgtcgatcagggccccccctcctctctccagccagacgtcggtcagggcccctccctctctccagccaggcgtcgatcagggccctccctcctctctccagccagccaggcgtcgatcagggcccccctcccctctccagccaggcgtcgatcagggcccccctcccctctccagccaggcgtcgatcagggccctccctcctctctccagccaggcgtcgatcagggcccctccctctctccagccaggcgtcgatcagggccccccctcctctctccagccagacgtcggtcagggcccctccctctctccagccaggcgtcgatcagggccctccctcctctctccagccagacgtcggtcagggcccctccctctctccagccaggcatcaatgccgttcaaggggtctggaccaacaagccctggtggagaacaatccccacagagaaactccgtgtgaccctgccccacagataacacggaaagggacttttcatggtcagaacctactgatctagaagtgatcaaacactctcttctcctgacttcctgtcaccaggcacgggtgaggaggaacaccagcaatttcttactaattacggctcaagcaccaatgtttgtccaccgttttcttctcacacagatctaagaggatcaagatgattcccagagtaacatctgtctcatttgaattccagtgtgcttccccgagtggcacagccgagctagtcttgggctctggaacagtccaaagactggggactcccctgtaacatgcagccacctaagagaacaggtcagtgacaagtagggggaaaagctattaggaaaaagaacaagttgtgggcctaaaaacaagatgtttcttatacaaatacaaaatactagaaaattgcacagcagttgccagaaaagatcccaagttgtggaaagtagaaaggcaggtgcatcccagcactgcggccgggggcaggaggccacccgcggggcattcggacccccgtgccccaaacacatcccgccgagcctcctgggaccaggcccctgagagccacggggctgtctggagagtgtccccagcctcagccatgtggggtagaataaaaatgattaagaactgcttgagaagttttaaactgcatgcagcctactcagcacagattggcccgtgtcttctgccacggatctcggctaaaggaaaagccaacagaagcccaccggagcctcccttacctccacccaacactgcacatcaagccgtgcaaccctgccccaaacggtcccagggtcatgggtgtgcatacatgtgcatgtgtgcaagcatgtcacaagaggagacctccgaggaacataaggatgcggactcctccctcagcctgaacctctgtctctcaggcacagctcgacctttgaccttcggcttccccagagaaagactttgaacgcttcactcctctgtagccctgaggacgcgggcggccagaccagtccctgagtgcggcaccatggccgtgtgagtttatggcccattgcgctagccctgtacagtgaatgagatactagttgtttacagctgtgagcatacacaggccccccgccacacgctcaggaaggagcttctcggaatctctctcctgcctcgcaccatgcagccgggctagcaggtttgtgggccgagtgcaggagcctgctcccactgtcactgcaggtgactggctgaggggcacacagggcccagaggctcctacctccagccaccgcccctaaactaatgaagattccagtccgtggggcccaccgcaaatcccagaatctcagcagtcagtcttggacattagttgtcggggagggagaggatctgggaggccaggcgtcccttccaggctgcgcagccggccacggcggcagagcttccccaggctgctccagccttcagggcccctccgcggtcagccccacccccggccagcaaggcttcctgagaaggctgagcttggcacctacagactgggggggatctggaattccccagaaaagccctcatcccaaagcccatgggaaaaccagccctgttggagcatcccacccggacctcggaggagagtccggcatggccagtcccctgggctctgcatgcagatggttttcccagaaccggttcctcttcctgaatctctgctaatggccctgtccatcagtctgaccccagccttggaaacccccatgcagcctgggccagaatgaagtaggcaaccagaggctcagggtgcttggggccgaaccacccccagctccaccacctccttcctgcccccgagccgtgccttcccccgctgggtgggcttgctctgcatctgggagcacctgggcccgggggtgcaggtgggttcgcccctgcccattggagggaaatgttctgacatggaagcagagggcacagcattcaggagaaccagtggggcctccacacagggggacgcagctaggaagggggtctccggccggtcggccccgagtgagggacgcagctaggaagggggtctccggcaggtcggccccagccctgactccaggcctgtgcatctcactgctgcccaaagcaaggaccactggctgccatgacagctgccacagtgctgagcaggcccagccaacgctgcatgagaaagggctctaggaaggaaaaggccgcggcagcacccagcctcctttctgaggaagcgattccacgagccacaaaagcgcctgggctgtggtcatcagagtccaccacaagacaaccttcctgggtccctacaccctggacacaccttcggtgcgtgcccggcatggagacgctcctgctgccggcatggctttggggacagcactttgctcctggagcctcagaggaggggggccggaaacatgtgtcctgcacagtcaccaccggacgccgaggtggccgccccagcaggggccatgggctgaggctggtcctcaggctcccagagcaatggctgctctggggaagagaaaacacagaagtgacaagatcaaggcaaactagctgctccagcacctcgagggtttggaaccaaaacaagaaatctccagagctgaaaagaagagtgaaaccttttccttcagaaggaacacagctaaagagaagatttaggggtgcacgcaagggccctcaggtactctgtgcagcccctcaaagcagggaaaaggccaggaatgaaacctaacgcagaaatgggaactggctccaacgccacacgaacagccagcctgggtctatcgcgcccagttcagacccgggctgcagcttggagacgatgacgtccaaaaaccaagctccaggaagacacaacaacaatcacccttaggctttgtcaggcatcccagagaatcctccgtcctaccctgggcacgccatgcgcaccaggcagggagggtggctctcagcaaggggctgaggactctggcccatcctggggcgagggaggcacccacggggtgggccatgcggggctgggagccacggcccccatgcaggtcctaagtggacatctgtctggtcggtggtcagaaaaaggatccccacggtgtctaggaaagactcagacctcttaccaacctctggaattttatcctatgggcagtcagggccaagacagatgattctttacaggttggaaattattcggataacataaaagaaacaatgtaaagaggaaagaacaggtgcaggagtcgttcctcgatcaattccaggtcaaggcaccggtttcggtccccagtgcggctcctgtctcctgacccagccccccggcccagcccccagaagcccggcacggtgtctctcgggacccaggacacgcaggtcagcgctgcagccgttactggctgtgttgtgataccagcagggcactgactgtccccagaaggaacaaaactgagacttaaatttgggtgattgttccaaatgtgggattcaagcttatttgaaaacgaaaactaagaatgccaaatttcagggtggctagagctacagccccaggaatccagccctgtctgcagaaacacacctaatattttcagacactcatagaacaaggaactactatttttgagaaaatactcacagaaaaacaaaatctcccagacactctgatgccgtttgaccaataacccatggggaaactcacttccggggatccaggcccgacgagggcgttcccgggcacctcggtgactctgaaactcatatctacagcaaagcttgaacgtttgtaactgttcactttggactctgcgtcacacccagagagaccctgaaccatctgtcacaggtgacgtaaccctcagttccccttcacctgtgccagagcctcccagacacaaaggctggagccccaaaacctgtcaggggcctctcaggggccagccacaactcactccgcctgtcactgctggacgcccgctgcggcctgacggagccgctccttcacctgtccacatgcatttcccacacagcacattgtcttgaatgaaggcaagttattttctttctcggccttggcgtcctccacagccgacactgttcttgcaatctgtgaagggatgatttctaagctccgcctttgttcttcactcactcacccaccgtatacatagttgcacattgatgcataatagacatatacttgctgctacggaaggccttgtattcctgtctctcttcctaccacagcactcctgccatcccacaggtaatccaattagcaggctgtgtgggtcttatccctgatctgcgcacactcatctgatctgtgtttatcattcttctagggggtggtgttgggcgctctcattttgcttcttttgaatcttatgccgtggaacttcctgcgagtcatgtggtttggcctgggcttaatatgttccttgaaagccacagagcagcccacatgtggatgcacatgacataatcaccgtttcagttggcgattactcattgggctgttcttgcattgctataaagaaacacctgagactgggtaattcaaaataaacgaggtttattggtcacggtgctgcaagccgtacaggaagtatggaggcatctgcttctggggaggcctcgggaagcttccagtcatggcagaaggtgaagggggagcaggtgtctcacacggcgagagcgggggcaagagcgcgaggtgggaggtgtgccaccggatctcacgagaactcactcactatcgtgagaacagcaccaaggggatagcgctgagctgttcatataaatccaccctcaagatccagtcgcttcccaccaggccccacttccaacgacggggtgacagttcgacaggagattggtggggagaccccaactcctcaacattgcttctactgtttgctatttgctcactcagccactggccacaggtgctgctgcagtagacacgtctgttcatcgccttcacctatggttcaaagctagaagctctggttgcacggcaagcccctcctttcctgcgtgaacacagacccctgctctgacccgcggctgcgtaagacgagacgcgctcagtgagctgcctccccgacccccaccacagttccacaacggctgtccaacctcgcaccctccagaggtaccggcacctgctgcccaacctcgcaccctccagaggtaccggcacctgctgcccaacctcgcaccctccagaggtaccggcacctgctgcccaacctcgcaccctccagaggtaccggcacctgctgcccaacctcgcaccctccagaggtaccggcacctgctgcccaacctcgcaccctccagaggtaccggcacctgctgtccaacctcgcaccctccagaggtaccggcacctgctgtccaacctcgcaccctccagaggtaccggcacctgctgtccaacctcgcaccctccagaggtaccggcacctgctgtccaacctcgcaccctccagaggtaccggcacctgcggggcatgacaccacatccccacgggaccccgtgtggccccttctgtcaacccatcggccagaggcccatccacacgtcccactggcccctccagctaacttatctgggcccctcaaaggccaggccgtgcatctcataacaccagcccaacccaaatgattccttcccttcctgagacctcactctctcttcaggggcaagttcaaagctacccctcccagaccccctccaagatgacagccaaaaccaaagccacctctctcttcaggagcaagttgaaagccatccctcccagacacccagatgacagccaaaaccaaaaacaaaagccacctctccagagtgtgagctctcccggatctcaacaccctcctacttattaaagtgtagctctttttcaaattatatatttgcttacatagaagtccagttcattacagacgaacagatagcttcaaattctgctagaataatacctcccatctatgaagatctgagcgggggaagtgcctggtgcatctaagtcccattaatctctgcaaaagaaggccttggcctccactttcacaaaccaagaaaccaaggcagagagaggttaggggtcatctaaaatcaaagaattgtcaagaaacgtggccagcacgcagtctcgggtgtctgattccaagtgggttcgctacgtccacgtctcccccgagggcccccaggagctctcctcctcaccaagcccctcccaccatcgctcagcagccttcactttcaaaaccttagcagccatcactttgcttgtggctgtttccagccaatacgtccacctcctttctaaacacacacacgtctatgtttaaaacatgacgcgccacctgcaaacacggtgccacagcctcagggagacgccgctcatccactctgcgcctgcgcggttcacacgctccttagctccaaatgcctcatttgcttccattagctccaaagaagcaagtcaaagtgttttccaccaatgccagattcccttccaggaatgacgcccccagggctgcctccggggtccacactctgcccaccagtccagcaccctggctgagtccacctgccaggcaccatttgctcacacacctgaaggctggatgggtggctgtggccctgcttaaaggatcacctctgcatctccaaactgtcttcccagcacaccctgtgtcttgggcctcccaggccactgtccacccacacagaccagcagccccttccttccttccctgcctgaacactgcctgcctcgtgtccctaaggtcaccaacaagtctctctgttctccagccctccatgattccccccattccaatccaagatcacagagaagaaacagctctccaaactgacaggcaggctgcagtggtgagcacctgtgtcccagctactcaggaagttgaagcaggaagatcccttgagtcctggagttggagagttggagaccagcctgggcaacacagtgaggcccagtctcaaagaaaaaaaaattaatggacaatactaagtggtgaggagaagaactcggatcccaggagcccgtggagctggggtgcttgggcccagataaatccgtgggtctccctttctccacctcagtgccgtggagtttccagagtttagataaaatgagataatacatggaaacgacgcccttagcatctgcatccagcctccacacccacacacgcacaagaaacccactcccctttccaggcaaggcccgggccccaggctgaacctgcccctgccggagcccctgctgtttcccaggtgcagccaggccctgcaccttcgtcctcaggggttaaaaatagcacaggcagcttagctgagctcggttaataaaatatccaagttaattttagcattaggggaatctaggatctctgatgccaaggcccatgtgtggccacacagcccctccttacactgtcagacagacacggggaaagccacggcgtggccagtatccctccctcaccttcacaaaacacttctcttacctgagtgagccctagccctctgaagacactgttgctactttctcttattaaacagaccatcacctaatttgatgcctgtaacagccctgtgaccagcggcctccacctcccgtgagggagtccatcaggctgagagtgtcagctgccacttctagcagagctgggcccggagcccttaccttctagcccaggagctggggccagggaggcacagtccaggggaccctccaggcaccccacttgtcattctccctattctcacccggtgccacctcctcctgcttcaggtgggattctgtttgtgatcaggagagggatagctggggctggaggccggcagcccctggccctcactgccccacaggcctgcaggcaccagcggttcaatgttgggccagaccggccgtgggtcttcttcacggacaagctccagcctcacaggaagggagcaagagcccagcggagccacaggcactgagcccagaggagaaagaagggagcgaccagagagccacaggaagccccagcggggagcccacggcaggcccggcctcccacggacggcattcccggacgctgaccgcctccagctcgacggcagggtcaccgcggtgcgagagcctttcccgccctggaccgcggggctggctttttttttttctgtaacagattgagagaaacaccttgtgtgttgctctttattgaacacatgtatcaagataaggcgccacatttaaaaacaagcagtaagtattgtggaaacggaagacatcactgcgaggggaggaggcactgcacgccttgggggcgggggccccaaaacaacgccgtggccgtggcggaagtgccctccctgtgggtccctgactcatggaaagtccgaagcacaggcttcctcaaagcagcgatcgcataggaagtgtggctcagtcatgcatgatacacagactctactgtgaaaggttaatgactgtttcaaaagacacagtgtttaagatgtttaagtgcacagaaggacatatccaaaatgattccacaaaactgaaatgcagaaagccagattcttcaagacaaagactccaaattgttaccaccaaagcacctcacttctacgtggcgctctcctcttattacctcacctgcaagagctggaaggacaaagaaagaggaagggggaaaggaggaagagattctttccatttttcccaatgtcaacgtctgaatgaggccacacaccaccacacatttcaaagctatttaagaatttaaatggccaatgcccctataccttaaaaaaagctcccaatccccccagaaatgtgctggctttttttcttagtaagagtagtagcagaattgcttatggtataactttagggacaattcttgttctgggagtgagggggcagggtgttaacttaaccctgaacaacactgccttgtacgttcccaccggatgtagtagacaataattgcctggcttttgcaaacggaaaaatgaggttatgaaggggaagacacgggccctgggtcatgcagcaagtcactggcagactcatgggcaaatccagcgctcctggagacaaggctcagaggtgaatgacagcgaggggccctcaaatcaaccacaggggcaccatcttgtctgagccttcaagaccagggactcaggcagggcaagtcagagccaaggttggccatgaatgtggattaaagaaagagcctgaggggctcagtggccccctggcaccagcgccgctcagggtcatcctccacttcgcttctacagatgggctttctgctggagccccggggtatcaggccagcagcacagttacatgagactaaccccaaaccagcgcacccacaggtcaccctcagggtctccagcccagactgcatctctgctcaaatgcaggaggtgccctgtctccccagctacttggggcacagatacccctcaggcagccagccctgcaggtgacctctggaggggagaggaaacggggacttcttgctggagccacatccagagagtcgggcagctggcatttgggcctctctacccgtcctcactgctgctgcccctgggagggtcaaaggttcagatgatatccaggccccacgtgggattagcagcctaagcctcagctgagccagggtttcactggcttgtttaaagtggagcacagagcctgaccaagttgtggcatctccaaacctccttctctccgagggatcctccagggtgcctgacccccacgcctgtcggaagtggggccgagtgcccgcaggccggtgaagctgccttctgggagactcagggtctgagtatctggtctgagactctggtcttccctcgccctcctgttctacttcccatgccttctgtaaagtcctgccgtggcctgaagtgtagcccttcctggagtacacagcgagcatgctgtgccggctgtgggccccccacccccgagccgcaaagccccaggccgcctctgcctgctgcctggagacctggcactgccccacaggggcacccacctccagccctcctgcccccgtgactgaggaagcccagtgcttctcacactcctcagactcgctggctgagccaagcagccttggctgaaggaaagagcagcaaactgacccccacgggccgcgacctttccccacccaggcaaggcgacctcaggcacttcagggagcgccagctctggctttcttgtatgaaagtgacagcggatttaaaccacattaacaaaagaaatccctcctctctggactactcaaagcggaagtgctgccacatcctagctgcagcgcttctgggccaaatatcaagacagtgtctcagcgatgatccgcaaaccaaaataaagccgacaggaaacagcccgctggtttaggggagctggaatgcctccggcagcatcaaatgtcatcaacaactgacactcagcccgttcccggaggcctcttcacacgggaagaggccggctgcgaagtgcggctcagtgggggagaaggaccgtggggaccgcgacactgcaggccctggaagcctctccagcctgaaccgcgctgtggtccagcacactcatggcatgaatatggaacagtcactccaggaaacggtcttgctctgggggagggggaggacttccacatcactctcccaagataaaacaaccagggaaaagcagatccctccagataaaccagaagtccagacacagcctcctctccggaaacgcctccgggagcccacttcagaagctgctgaagcccagagaaaaaccgcagcctcgcaggccctggtcgccaccagctcgcccgccacttctcagtggaaagggacgtggtgccgatgggtccggggtctccccgccccgcgggagccctcagccagaacgccccaccagcacacacgcacacatgcacacacacaaacgcgcgcacacacacgcgcccacacacaaatacacacgcgcgcacacatgcatccacacacaaatacgcacccacacatgcacccacaaacgcacgcgcacacacaccgcccacacatggacacacaaacacaagcacacacaaacacgcgcgcacgcaggcacagacgcgcgcgcacagcagcagcagcgcgccggggcctcacgcccctggggagaagcgtgaaggagcctccacattccccggaaaggaagtttctgggcgcagcggagaaagggagatgccgagaccccgacgtcagtggatttgacacctgaagtgcaggcgcccagacagcctcaggcgcgcgcactcctgcaaacacgcggggcacacgctcgggcgcacacgcggacagacgtccctcggcgcagggaccccacctcctccgccgctaccagggaccggggccgctccgggcgcagaggaggcgcagggagccgcgttaccccggagccgactcgacccagcccgaggcccggggaggcggggaggtggggaggggccgcggagccggaccagccgttctccggggagcgcgccgcgcctggagggcgtctccgccggggtccccagcaaggatctgcggaggggaggcgggcgcgggagaggacagggtcgggccggggggtcggacgcgtggctgccggcggacactcaccgatcttgatcttcacgctctggaagacccggagcccctcgtcctccaccgccatgctgcgcgtccgcgcccgccgagcctcgccccaagcgcgcgccgagcccgggcagctcaggccgagcaggaggagcggcggcgccggagccccgagcgcggccgagggtccgcccgcctgcaagaccgccagttggccgagggcgagggcggggaccgggaggctccgcccgcggcccggcccctgctcccaactggcccgggccctgcaggggcggggttggcagggacggcgctggcgggtggcggagacccggggggcgcagggatcggcttcccccgaggcctcggcccccgcccccgccccgcggattggccgctgagcggaagggaccccagcgggctgcctggcggaagagacgaaggaaggtcgccggcgcggcccgggcccgctgagcgaggctgagcgattgactcgcggacgaactttgccaagagaagttcacgtacaacgatctggcaggggaggaatcccgcgcccagccccagctcctgagatgcgatccgaaggcacctgctgcagacgcacgaggggggcggggacacatacacgcacacacagccccccaccccagacctccggcatgggcaggtcccccccccaagtccccctgcagaccccagcatgggcaggtctccccccccccagtccccctgcagaccccggcatgggcaggtctcccccccccagtccccctgcagaccccggcatgggcaggtctccccccccagtccccctgcagaccccggcatgggcaggtcccccccagtccccctgcagaccccggcatgggcaggtccccccccagtccccctgcagaccccggcacgggcaggtccccccccagtccccctgcagaccccggcaccggcaggtctcccccacccagtccccctgcagaccccagcatgagcaggtccccccccagtccccctgcagaccccagcatgagcaggtcccccccccaagtccccctgcagaccccagcatgggcaggtccccccccagtcccctgcagaccccggcatgggcaggtccccccccagtccccctgcagaccccggcatgggcaggtcccccccccaagtccccctgcagaccccggcatgggcaggtccccccccagttcccctgcagaccccggcatgggcaggtccccccccagtccccctgcagaccccggcatgagcaggtccccccccagtccccctgcagaccccggcatgagcaggtcccccccccaagtccccctgcagaccccggcatgggcaggtccccccccaagtccccttgcagaccccagcatgggcaggtccccccccaagtccccctgcagaccccggcatgggcaggtccccccccagtccccctgcagaccccagcatgggcaggtaccacccttacctccctttcttctgtctcgaggtctcctcctccctgacctcctctctgaggagtatgtttgtgtgtgtgtatgaactgtaggtgtgtatatgaactgagactacactccctcctctatgttgcaaaacttcattgcacccagtgccacacacacaccctacacatatatacacacatacatataccacacatacactacatatacatatacatacacatagacacca

SEQ ID NO: 502 - DNA, 131382 bp, Homo sapiens
  source 1..131382: mol_type = genomic DNA
ttttagatatagctgttagtaaaatttgcttagaatttatctatatgtaggatgactcttcaccatgtgtgagtgctgttgtctctctcttaaatactatccttttgttttttccactgcttttgcctcacattaggtagcttctccaagtaattaggaaattagtatgtcttcttaacattagatctaaaaactcttctagtcatctagatggaggttaccagcataaaaagcatatacattattttctgattcttacattaaaaaaatctactcttaaattcctttttgaagagatattaataaacatgcacacaaagtaattatgtagatccatgtttctcctatttagtgagcatcagaatcacctgaagttaatcatctgagccccagccccagaggttctgatccagggttgctgatgctactggtcctcggaccacttttttttgtcttttttttttttttaatttttaaaatttttttagacggagtctcgctctgttgccagactagagtgcagcggcacaatctcagcccactgcaacctccgcctcctgggttcacgccattctcctgcctcagcctcccaagtagctgggattgcaggtgcatgccaccatgcccagctaatttttgtatttttagtagagtcagggtttcaccatgttggccaggatggtctccatctcttgacctcgtgattcgtccacctcggcctcccaaaatgctgggattataggcgtgagccaccgcgcctggccggtccttggaccactctttaagtagcccctcctatggagaaattccttgtgcttcttctcaaagtgttactcacgtaaagagcagctaaaacaaacacttactgggtggctaaaacaaacactgttgacagacagtaagtgtagaatgacagagtaagggagggaggtgacagataaatagatgactgttagataacaaatcaatacatagacatctaatagaattatatgaaggaccttaagtaataacagttttaaaaattgtctttaaaattaatgttttgaaagcatggcatacacagtataatatttgaaagggaaaaaaatatgtatgtcacaaattaaactgtcccttcattccagacatacactcccaccttgaagaatcaaccatatttaagtgtctataggatatgacaacttatagtaaaactgagaccataggaaattaaagaaaatgttgactatggtgcacagaccaaagctgaattatttgaggccaaatttttagtttgtttgttggtattcatttgaaagaagcacacatgcactcatatacctaaggctgctttctgaaatcaaatacatttcctgccttcttctttcctcagtactcttaccaccagcctatttatagcccaggaaaggaaaaagctccactggaggcaggaaaactaagttcggaaagaataggaggaagtctgcctgccatttagccaaacaacctttaattcattgagctcaaagcttagcagcttcaatgttgttgttaggcataaacagcttgcaaatttcaattttttttctctcctcacttttgaactagatttgggcaatggaggtgatgacagcattttagaagacagaacaggaattctaggtgtttaggcacgttgaagagaaacttgctagaggtgatgaagtggaaagaaaaagacaattcactatagggatcaacattattgcagttctgcaaaggtaagtgtcatttaaaaatctgtctgttgttgcgtcttaatgcacttcatgaactatggatattagccacagacaatggatatgatttgaggtccgatcctcatgtaacttttcaatatgctttgctcatatctctgaagaaatgtagaaatcaaccttggttatgacatcttcaggtttttacaataaatattttaaaaagttgtttcttgacaataactttacaaactttcttcagtttcattattatcaggggtttagatagtataaataatttcattgatgatcacctttaaaaatatatttttgatatttgtctgcttgtctgcccttttcaaattgctgattaataatccacctataatttatttgatgaataatagtttagaatacttttaataaataggccttcaagcagaaatggacaattgtataaaagttatatataaaatttaaattttgtataaaattaagcaaagataacaaattttaatacaggttttttgtcttgaacattcatttttcagaaaatggagaatcttctagaaccacaaaaaacagcactgaatagtttccagtgatagaaagtgttcatagtagttatgtagatttaaattattatttccaaacattcgttcattatgttttgagtaccttgaaaaatgtcactgggtttggaaatggtaaggttgaaaggaaatggattaaatccaagaacagttgatgttgcccacaaaaacttggaaagctactagggacattccaaattcttttaacattctttgccattaaacaagcacatttgtttaaatgatgcaccatatttgcatccgctgctgataataaccacatttgtgtcttggagtaacttgattaatgttaccacaatgactaacagaggaatacggttctggtggattattgaaaaggaagagcagaaggaaatgtgtggctgttatttcttttgccctatccctgtttgagattgggatgtttagaatctgtcccaagaagatagcaaagctggaagccagaaaagcagaaccagctagaaccggcacaggaggccaggactcggctcaggctcagtgtggatcccactggccgtcttctttcctgggagaatttaagggttattttttactgattagaaaattataattccatggaaactgttagaaagtataatatgtttgaatagaaagatcatgatttcttagctgaacttaagtggttaaaaaaaaaaagagagggaaatgaaattaatctgaataaatatgatagatctgaagaaacaaacaaacaaaccctcagcatttattttcaggacattccagtgctgcaaagtcagttctgagtccactttagatcttccacagagtggactctaaggtgacttaattaattgccacgccacatggctctaattacagcaatgttgcttacagcaattctgatttctgatcatgttgaactcatttcccttagagtttcaaaacaacgttcacatttgacacattcacatgtttacattatgagaatgaaaatgttttaactgtatgtaaggtttaagaaagataaaattatgagttagatgtattatttcaagaatatattttttcacttgtaaaaggctcattgctggtcattggtttccagatgaccatagatttataaatgtattcatggggccaggcgtggtggctcacgcctgtaatcccagcactttgggagaccgaggcgggtggatcacctgaggttgggagtttgagatcagcctagctaacagggtgaaaccccgtctctactaaatatacaaaattagctgggcgtggtggcacatgcctgtaatccttgctacttgggaggctgaggcagaagaatcgcttgaacccaggaggtggaggttgcagtgagccgggatcgcgccactgccctccagcctgggcaatggagtgagactccatcgccaaaaaaaaaaaaaaaaaattgtattcatgaaatgccaggtatttaaaatacagttcttagaaattgcttaatagttctacggtagttctacagattgttttatgtatctacaagttgctgagaacattttaagttagagttagctaattttgaaaaaaattatcaattttttagctttttaattaattacatagaaatgtattgccttatttccagagtaactcctacaatcaccatgtgtttacagtttacataataatagagccaaccctggccttcacatttaaatacaagtaaaatcaggttactgaagagaccatatgaagcagcaagaaatttagatgtcaccaaatacaatgtacaacttgggggatgtgttgaagagggatgtgggagaagcatgccaaggtcttcttcttcagactggaaactacacccacctgccatctggcctgacgctgggtggggtagaggggtattgcacgatgattcttgtgtatttacaggcaccttaaattcagacaattggcttttggagacttttctcctactgtctcatcctgtattacaggtctacaagcagcaccacaccatgaacacctatttattaagttttctaacttacaatataatctctatccttgaaaaactcaatgttaagttgaaaaaagggaagtatacaggacacaaagcatcctgtatgtggagccaaattaatgacgtagataatgagtgccacctaaggaagacctgatccagacgggcttcatggaggcctgaggctgagttgggtcttggtaagcgggaggagagctgatggatgagggagatgaggacatctatgataagaatggagctgtgagcatgagcagagacaggaatggccttcctgcgcccaaggaatagggctgtcagatgaaatacaggatgcccagttcaatgtgaatttcagataaacaacaaacacttttttagtctaagtgtgccctactgcatgactgtgtatgagacttagtgcatgggacctacttatacgaaaatagtatttgctgtttatcagaaactcacacttagctgggggccctgtattctgatttcccaaatctggcaactcttcaagggaactgagagtcagccagcttgacagcagcagagggaatgagcctatggagcaggaaagaagtgcctggaggaggctgggttcagaaggtggtgggactttaatggtgaactaaggagtcaagaatttaaagacacctggggccgatgagaagttctgaaaagggaaatggcgtgcataagatctgccggttggaggcagaacttgctgggggagagatcagggcaccgaggcctgggttctgatgaagacagagagaaagaagcccaatggagacacatctgagaacaaactgacgcgttttgcaaactaattgggtatggttataggaggagagaatgtgttcaagaggatgttatgttttatggctccattcaaagaaatggccaaagagacagcagcaggtcagggagttagtgagagggatggggattttggtttcaaacacaggaaatttgagggaatgatggaatagtcagatagaaatagtaagcgaacagctgagaatggaaaacagcttaggagggaggtgagaactggaaataaaaacgacaacatttattaagcacttactcgatgtcaagccttttatctccattatctccttctgcctctgcaaccatctatcggcaggttccattgccagccacattttgtagttgagaaaagtgaggtcagagagattaagtaacatgtccatgatcacatcattaatgagaggcagatggaaaatggaaccaccatgtgtaggggccaaagccctcacaactgagactcatatacagaatgttgagcctctggctctagattcactttctccatctgcaaagagctaagggcgccagttgctcatgctagaacccagtttttagccaggttccaggtcttctattgttcgtaactttgatggccctcgtagaattctccatcttttggttactctctctgagaaaatggaaatcatttatacccagaggttttccttatttattaacctccagaatcgtttttccccttagtggctcattttaaattttcccttggtcatctggtgaaataaagattatgatgaagaatctataatctcatatagttactttttttgtatgacatgtgtggctaaaacatacttattttacaaaaatcccgaatacaatacaattttattaaatttcatcttgaggttggacattagatctccaaacttgtttttttttctttcttcttcaagacaaggtccccctctatcacccaggctggaatgcagtggcacaagctcggcttgctgcagcctccacctccagggctcaagtgatccttgtgcctcggcctcccaaatagctaggactgcaggaacacgccactgcacccactaatttttgtattttttagtagaaacagggtttcaccatgttgccaagttggtcttgaactcctgacctcaaatgatcctcctgcctcggcctcctgaagtgctgcgattacaggcgtgagccacggcacccagcctccaaacttgttctttagtgtctgctattttgtatcctttgacctatatgtccccatttccctttcccccctcctcccacccttagtggccactgtttcattctgtatctctgtgttttagggtttaaaaaatattccacatataaattagatcgtgcaatttttagaaaaaggttatgctgaagagaaaagaccaagggtgtcaacctcctctccttgtccctggctgctctctagtggcaataccagaaaacaacgctcagcccagagacagcagagccaggcactagaagcaagctctttaggaatctctaaatagcaaattcaagaaggctagttgtgctaggaaattctggaagaagactccatggaattacatacacccttacagcttgttggcctgaaaggcattttgaatagaacagttttagatttatcttaaactttctaatcattaaaaatacttcacctgtttaccattttaggcaggcacatatgtttggctactaaactttcaatgcacatacgtgcctttttattaagatttcctagatctttgattctaaatatttacttcaaaatacacaatatattttttagtaaaaagcaaaaagtctatcttttagggatctattcttaaaaacatcataaattgagacaataatgcgtgtgtaaaagactattcataacagatacattttgtaactaacctaaatatacagggaattgttaaataacattccacaatatgaaattttatacagacattaaattacattataatatttaatgacattggaaactattcatagtaaatgttaagtgaacatttacacttacattcagtgaatgtaagaagtctacaaaattatgtatatagtgtgaccccatttgcttaaaaaatatatatgtacatatgaaaaaagaagtaagagctaaaaagtcatacaccaactgttaacaatagaaatttcttagcctggccaatatggtgaaactccatctctactaaaaatacaaaacttagccaggcgtgatggcatgcgcctgtagtcccagctactcaggaggctaagccaggagaattgcttgaacccaagaggcggaggttgcagtgagccaagatcgcgccgctgcactccagcctgggtgacagagcgagactacgtctcgaaaaaaaatttctggttggtgggataatggtgattttgattttctactttgtctccaggataaataagcatgtactacttttataatcaggaacaaaacccagtatgttttcaaaatgtacagagctaagtctctgttctgatttcttgctgtcatggctgacaatatgttcatgctaattcattgccattgacggcctctcctccaagtaaagggctatatcctgtttgtgacagcataatccattgtaatggaaaagattatgatgcactggcctgttctatgacttcactgcattcatcagcagcaggaaacaaagacatgcacttttttcataattgttttagtaataattgacaattggaggaaatgaatggcagaaaacaattatgggcagacaagatggtcagcaaatcaaactgggaaatgcaggggagcccgtctcagctttattcatgtagcgatttcagaacattacaaagatattattgttttgttctcctacagaaatcactattgttttttttttttttcttttttaccagcagttacacaattctttgctggcagcaatgacttccaatgtgtttttaattcagtaatccggtaatcccacaacagggatttgctgctgaactttttatgtttattaatattcagggtcagtgtgaacgcctccctgtgcacatagctagtaaaatgcacagcgatattgctgtgacttttcttgcctctgaataactccctgttgcccagacatagaatcttaaaagtgtttctttctattacatttataaatagcaaattcatgtttctattttttaaattgtccctagtcttcattttaatagcaatgggcaggagaataaaacaacaaaaactcaaaacaagtgaattaatgattcaatatctagtttccatgccatgaaatgggcacatcccttagatgaaaatgagggatgggttatcaattaggaaacagttaagtaaggcaggtattatgctgtggtaacatttatttatttctcttagcggcctgtgttcatagttgtcttgctgggtattactagaattctttggatggggaaactaaacatgtgtgggctgttacatcactccaagtcatactcttctctggttagcctgatatggagtaaaattcggcagcagctctgacttccagttttaaagactacttactgctcttactatttattatggaacaccctacagcacagtcctgtagaaatacatacctgtaatcccaacaatttgggtggcagaggctggaagatcacttgaacccaggtgaccagcctgggcaacatagtgagatcctgtctctaaaaaaaaaaaaaaaaaaaaaaatagctgggcatggtggtacgtgcttatagtcctagatattcaggaggctgagttggcaacattgtttgagcccagttgttcaagtctacagtgagctatgatcacaccactgcactccagccagggcaacaaagtgagatcctgtctcaaaaaaattaaaaaaataaaatataaataaaatgtgagccactaatgtgacctacatagttcattttacatttcctagtgaccacatttcaaaaaataaaaagaaacagataaaatgaattttaatatcatagtttaaggagtgggggatagtgccttacacctgtaatcccagtgttttgggaggcaaaggtgggaggattgcttgaggtcaggatttcaagaacagcctgggcagcatggcaagaccctgtctctacaaaaacaattttaaacattagctgggcatggtggtgcatgcctgtagtcctagctactcaggggactgaggtgagaggattgcttgagcccagtatttcgaggatgcagtgaactatgattgcaccactcactgcactccagcatgggcaacagcaagaccctttctaaaataataataataatatagttgatttaaccaaatatatccaagataacatttcaacatgcacccaatataaaaaaccactaataaaaactttatattccctttttgtaataagtctttgaaacccagtgtgtattttatccttactgcatgtctcaactcagactagcctcatttcaagttgatagcttcaggtgcctagtggctactgtataagacagtgcaaatctaaacagaagagctacggtgccacccacagctcataaataatgtgaaatttagactatgagatattgctaccttttctgtactcacagtcatctccattctgaaacatttgagctgaacattctatatcaagtaagattgaatagttgaatagcaagccaaggactggcagttttggagatttggcttattagaatgattcagctcttcacctgggctgggtaactatggattcctcagttgagaattagggcaatagaagtttttttaataaacattatccaaatttgaaatctggatgatatgcttgtaaaagactttatcataatgttttgaagtgaattttaggtataggaatagattcaattacacagcctaaaatcgagttccaaaaaccattatagacattatgctcctaatagtgcctacaacttagtacaaagaaataaatctttagcaatggaaacacacacaagtgcacatgcacacacgcacatacttccaacattgtgaccacttgctgatgtcttttctgcattttgcattgtcttatttgaaggataggaagtatgctataataatcttctataactactatgccttggggactctcatgccagtcagctggtgtgataaagatagcttctgtgtgctaaatacggagatacaaaaatagaactggtggaagtggataaaatcagaagacactgtaggttcttatggccccaccaatggcagagacctggaaacataggtctctgaaatcctggcaatgagttgcagccaactggaatgatcacatttttggttcttgtcttattccatgagggtttggttatgaaactagagtttaaccagtcagaaaattctgaaatcaaaataaaagttaaagacatatataaataatgaccattcattgcatgatttacaaattggtaatggtccaaaagtttgtttttaataattttcttggccctctgaattcactttacattttccccatagaaacaaagttataaatagtgactgcatactgcacctaaaatgccacgtatctacaacgaaattattacaatgtatttataatatattatttattctaaacatgtatgcatttgaaattattcaatgaaatctaactattgatgtactatttctacattaatacattatatcatatattaatatgctaataattatatcacattaatatattaataatatgttaattaaccaaacagaaaaagtatatactggatcaacaaaaccaccttgaattcaaagcaacaaacactagtaaagaatccaggaagtgccaggtgctatactagagtcagggacaagcgtaagagataaatcatatttatcttgtttcttaatattggaggaaaagcaaatttaccaacgaaaaatgaggaagtaaatggaattcttttttttaaaggggactgccttatctaagtgacccttaggtagagagaccttttttaggcttttatgtctaattttactgttaaactttgtgcttgccttttcctgaaggacaaagtacgactagttctgctgttaatgtgtagccattcttttttgttggttcccaaatagggtaattttgttcgtttgtttgtttgttttgtttttgagacggagtctcgctctgtcgcccaggctggagtgcagtggtgcaatctttggctcactgcaagctccgccccttgggttcacgtttctcctgcctcaacctccctagtagctgggactacaggcacccgccaccacgccgggctaatttttttgtatttttagtggagatggggtttcaccatgttagccaggatggtctcgatctcctgacctcatgatccacccgcctcggcctcccaaagtgctgggattacaggcgtgagccacccacacccggcccaagtagggcaattttttttggaaattttttggatttttttttttttggttcccaaatagggtgagatttctgtgaagtaacacttggctaagaagtagaagagaggaaagtgaagagaatggttagaattaaatatgcaggcacatgagaattgtgcatgattgtccagttctccttggagaaagggtgaggaagactagagactgagcctcaagaaatgatcctcaacagcctctagggtggggaaaaggaagggagggaatgtgtgcaatttcacattcaaattgcacatacaaatttccgagtcagttaaagaaaaatctcttggtgagtgccattaactgttggatcctgcagagactaccattaaaaaaatatatcaatagaaaatgaggaaggactgggccgggtgcggtggctcactcctgtaatcccagcactttgggaggccgaggcgggtgcattacgaggtcaggagatggaaaccatcctggctaacgcggtgaaaccccgtctctgctaaaaatacaaaaaattagccaggtgttggtggcgggtgcctgtagtcacagctactcgggaggctgaggcaggagaatggcgtgaacctacactccagcctgggtgacagagcgagactccgtctcaaaaaaaaaaaaaaaaaaagagggggaagcagtgaccaagtcaggcatgaatgggccttcagggaaggtcaagaaatctgggttgagtggtcccactggttgatttcacaaaacagtgagaatcagggacctacaaatgagttgagattatgtatgtagcccaaggaacaggaggctgggccagggggacagactgttctggaacactctcttatttcttctgctgggaactagggctgtttctctggtaatggaggccctctgacaaagacaaaacatagggtaattgtgccacatgctactcaaagaggtgccccaaccttggagtgtgcacatttttttttttttgagacagagtttcacttggtcacccaggctggagtgcagtggtccgatcttggctcactgcaaccttcgcctcctgaattcaagtcattctcctgcctcagcctcctgagtacctgtgattacaggcgtgcaccaccatgcctggctaattttttgtgttagtagagacgaggtttcaccatattggccttgaactcctgatatcaagtgattcgaccgccttggcctctcaaagtcctgggattacaggcgtgagccaccgcacccggcccatgtctgtgttttctatctgaaactgtctcctcaccttctggtcaatgaatgcatccttcttcaatgtcttctctcaatttcttttgtttctaggatattttcttttaaaacatccatatctcttctttgccatggaaactacacccaatctacctgaacctgcggcacccctctgatgacccatttggattctctgatttcactgccaagattctcagtgagtattccatcacataccacctttattttctcaagtctctttcagattttaaacacataaaatctgatcacatgttttcaaccccactgaaactgtgatgtcagaaactttgtaaattatgaagtgaacaacatttttgttcttcctcatttgatgatgaagctgtcaccagtcttgagtgaatttgccctcttcagaaatgctataacatttatatactgtaatactatataaatactttcttatatatttaatcccatgtctggtggtgtttctttaatttattcaactactatttgcctctgtggttaattttccaagagtttcttctctcaacaacctaattataaattccttcatgtctaggccttattttgtgctttaaaaaaaactctctgtggtacactaatgttcatagcagcattatttataatagctgaaaggcagacacaaccagacacaacccacatgtctatcaacagatgaagagataaacaaaatgtggcatagacatgcaatgggaaattattcagccataaaaaggaatgaagttctcatatatgctaaaatatgaatgtaccttgaaaacatcatgctaagtgaaataatccagacacaaaagaacaaatattatatgattccacttatgtgaaatatctacaatatgcagattcatagaaacagaaagtagattagaggtggctgggggtggggggaaagggagaatagagagttatttcttaatagttgtaaagtttctgtttggtgtgataaaaaagttttgcaaatagtggtgatgattgcacaacattgtgaatgtaattaataccactgaatagtacacgtaaaaatggtcaaaatagcaaatttatgttatatatatttattacaatttaaaaattaactatataatatagcaaaacgcagtgaattgtatggtatgtgaattatgtttcaataaacctattttaaagaaatccctctgggaaccagatataaccttacatatagtaaatgtttaagtaatattttgtatcatttgttgtaatgagattcattaggacacaaatttacatgtggtagagattagacatgtttttcaaattatgcataccaggtataacatgattactctctgtttggggctttaggtaggtttagacaaaagccaagtgctgtgcaagtgtgattgagaccttaaacaatgtcttcatcatttctacctctcccagattaccagacataagatcaggtgcatgacacataccaacttcctaatcttaaatttggtgaatgaatgaaagtattaacaaagtatgcagagttaccttgcatatatatgcatatatgttttttctcaaccaacctttcgtcattgcaattgagacattactttttcagacatctacttttaagacataatacgttatactatgtagatagcatagaatattgtgcaggaatctagaaaaaaccatgtttgatgacatacaacagaatatttcatgacattggaatatttaataatatttaggccgggcgcggtggctcacgcctgtaatcccagcactttgggaggccgaggggggcagaccatgaggtcaggagattgagaccattgtggccaacatggtgaaacctcatctctactaaaaatacaaaaattagctgggcatggtagtgcatgcctgtagtcccactcctagggaggctgaggcaggagaattgcttgaacctgagaggcagaggttgcagtgagccgagattacaccactgcactccagcctggtgatagtacgagactccatctccaaaaaaaaaaggaatatttattacagtgaaaatatttatgatatatagcaaatacaaaatgcaaacttttgtatatttgaccattatgcattttagtaaagataagaaaggtattttattacttatttctgtgtaacaaatcattccaaaactaagtgcctttaaacaactgtaagcatttattacctcacatgatttctttgggccagaaattcaggagaaggtcagattaaggagtttcatttgtgaggttgcagtcagttgtcacttgggactagagtcttcggaagactcaatagggactagagatttacttttcttatcgttatttccagcccccaagctttattaagatattgacaaactaaaattgtatatatttatgatgtaaaacatgatgttttgatatatgtatacattacaaaaagatcaaatcacctatttaacatacttatcacctcatataccaatcattatttttgtggtgagaacatttaagatatatcctcttagcaattttcaagtatacaatacaatattaactgtagtcattatgctgtacaacagaacttatacatcttgtcaaactgaaattttgtaccctttgatcaaaacctcctcattctcacctcttcccagccccttgcaatcctcattctactctctgttactgagttcaacttttttagatttcacaaaaaatgagatcctgcagaacttgtctttctgtgtctggcttatttcacttagcataatagtctccaggtttatccatgttgttgcaaattacagaattttcttattctttaaggctaaatagcactccattgtatataccgcattttctttatccattcaactgtcaatggatgcttaggctgattccacatcttggctattataaataatgccacaatgaacatggagtgtaggtatctctttgacatgctgatttcattttctttggataaatactcagaagtgggattgctgaagtatatgatagttctattttaaatgtttttttcttttttcttttctttctttttctctttctttctttctttttttttttttttttttttttttttttttttgagacagagtcttgctcattcgcccaggctggagtgtagtggcatgatctcggctcactgcaaactccacctcccaggttcacagcattctcctgcctcagcctcctgagtagctgggactacaggtgcctgccaccacgcctggctaattttgtttttgtatttttagtagagacagggcttcaccgtattagccaggatggtctcgatctcctgaccaggatggtctccaactcctgacctcgtgatctgcccgcctcagcctcccaaagtgctgggattacaggtgtgagccaccgtgcccagctgagcattttttcatatacctattggccatttgtatttcttcttttgagaaatacctcttcaggtcctttatccattttaaaatttgaattatttgttttattgctattgagttgctttgagttccttacatattttggatattggtcccttatcagatataatacatagttttcaaatattttctaccatcccacaggctgtctctacagtctgttgattatttgctgtgcagaagcatttttgtctgatgcaatctcaactctctgtgtttacttttgttgcctgtgcttttggagtcatatctaagaaatcattgccgagaccaatgacaagaagatattcccctatcttttcttgtagtagttttatagttttcaggtgttaagtttaagtttttaatctattttgagtttaagttttaatctattttgagttcatttttgtatgtaacgtaagggttcgatttcatttactgctgctttcaaagttttttctttgtcttttgagaatttgattgtaatgtgtcttggtgaagatctctgtatttaatctgcttggggctatttgggcttcatagatctggatgctcatttgcctctccagatttgggaagtttcttatcattatttctttacctaagcattctgctcttttttctttctttgctacttttgtgaatcccctaatgtatatattggattgcttgatattgtttcataaatcctataggcttttttcattcttacttcttctttgttgttgttgttgtttctctggctgaatatttcaaatgatctgtctttgagctcactgattcttttttctgcttgattgaggctactgttgaagctctctatggaattttcagttccatcactatgttctttagatccagaatttctgccttgttcttttttatggtttctataccctcatcgaatcccctattttgctttcatattgttttcatgatttgatttagttatctgtattctcttatagctcactgagctctgttaagatgattattttgaattctctgacaggcagttcatagatctccatttatttagggtcagttacttaattttgttgtttggtggtggtgtttcccttattattcactatctttgtggctatatattgatgtctatgcatatgaagaagtaagcacctgttctaccttttacatattggctttggaaagctctcaccagtctatctagagattctgggtgggttgtttggtggaatctgagggcagacttgctcctgtattctcaggcaagttgccttggtgcctgagtcagcaggcaggaaggcctggagcttgcatctcctggggtgggcctcgattctgggttcatgggagtgaatctggaccctgtgtttgcaggggctggcctgaagtctaggttcatgggggccatcctgtccatgagatggaccttgagcctgagttcatagaggcccactttgttctaggatgggcctggagcctgagtccacacaagggctagcctggttactgggacttgcctaaagcctgtgtctgcaggggttggcctagaggttgagctgctgtggcagacatgcctctgggtgtagagcctagtgctgttgtattggtgtggtgcttgaatggagctgcagcctgatgctatagaggcctgcttgcagcctggggccataggggctggcccagcattagggtagccctggatgcccttatccacaggtgctagcctagagcctgggatcatgagggctgctctggcactggatttcactgaagtgggcccgatgctgtggtccatagcaaagtagggtgttcagttcactctccttcccccacagggaaggtatctttctctgtgctgtgcaccccttgggggagggatgatatcagtaatatgacactctttctcgccctcttcaatgtgccttttcttatttctgtactggggtaggcatggcagtatttgtgccccaagggccagagacatcaaaatggattaagaatattttaaaaagcaatgagtgtattataaagattttgagcttccagctgaagacgggcttaacacacacattatctacctttgtttccttttgaaaccccattaagatgagatcaaagggtttttgatctcaactgggattctttagttcttgagaaggtacattcatgcatggatagttgttcaaattggtgtttctgtaaggggatatgtgctggaaaatactattgcaccatcttgctgaggtctgcttttgaggtggctcacttatatggctggcatgttggtgctggctgttagctgagacttcagttcctttcttcgtggacttctccatgggtcttattggatacccttataaggtggcatctgactggcttctttcagagtgagagattcaagaaaccaagatgaaagatgcaaggttttttatgaccttgccttggaagtcatacgtcatcacttttcatgtatcctattggtcactcagggtcagtcctgattcagcatgagcaaggactacatgaggatatgtaaggatcttgggaggccatctgcagattatcacatgtatatgccaaaataatgttataaaagatgtaattaaaattgatcttatttttctcctttgtacttttctatactttaaaagttttttatgataaacatatatgatttttgaaattacacacatacaaatcaataaaagtgggggtttttttgggttaaacaagagaaatttatttttcactatcctggaggctgaagctcaaaatcaaggtgtcagcaggtttggtttctcttgaagttgtctctgtggattgagatggctgtgtttttcacagtcatcttcttcttttaagtaaaagttatttttttaaaagccatacatagtccagagaggagtgagtcaattcttgttactttgatttaacactgatgtcaagttcaagatcaaggtgtcagcaggtttggtttcttttgaagttgtctctgtggattgaaatggctgtattttcactgtcttcttcttctactttttaagtaaagttattttttaaaaagccatacatagtccagagaggagtgagtcaattcctgttactttgatatgacacatcaatgcatctatacttttctctgtttgatgtaaccctgtaactaaggaaaggagaatttttatgggaggagggatggttttaaatatagagcataagactggaaagatgtgaccaaggtagagggtctggggtaggcatggcagtatttgggccccaagggccagagacatcaaaatggattaagaatattataaaaagcaatgagtgtattataaagattttgagcttccagctgaagacgggcttaacacacacattatctacctttgtttccttttgaaaccccattaagaagagatcaaagggtttttgcccaagtgggagatcacccatctctcatcatagcagaaggctggaagtttattctctcaacagggtaaaatatagggtgtttaggctgggggaccctggtctctggaccagggccacctaaaggcagacatattacacttgaaactggaatattaactgaaaagttctccctcagaaaatataactgctaataggttgtaagttttataccttgtatatttgccacagaaaaaggattttctggttctatgtcctaaaaatttggggaagggagtcatttgattagggaatcatccacctcaatcacatgcttattcctggaatactcaaatgtggccaaaaaaagagagggatcatgattggctcagtttgagttacatgctcatctgggccaaggtagggggggcataaggggtggttgaatgtggtgatggaggagagtgggaatgtcaggaaaacagtgtcatagatgtcaactatagcttctcaccctcttctataggagatgatgtcatgtaggcaaagatccatgaaagcttaaaacagtcttatggatgtaagaaaaaagtccactttaccatatattatggtttttcaaagaagatttttctatattatttcaattcttcttaagaaattcatgaaacaaatattgccattctcatcttgttgcttgatcattgaggtgaactcatagtagtaatgttctggactcagttactgtcccttgagtggattaagtcagggatgtataagaagccacatcttttgattcttagtcctgtgcaatttttattttatcatcccagtgatcaggatgggatcacaaatttgtagataactgggctgggaatgatatctggagagatgctgcttacaggcaatgaacttcattaatgtccatagtttcctagtatctcacctacaattccctcaacatcagtcccaacacgtgtaaaatcgatggagactgggaaagtgctgccaaaggcagaccgcccgaggagccatgtggcctacttttggaataagactgaaggattaacttctgggaaggactttccatctgttttcccgataagattgattaaaaccatctaaccaagttttgcagactctatgaaagaacgaatgaattgtatcgtctggcctggtttagttcaaattccttaaaggagttctagctccactattcaggaaaggaatcttcaccatgacacctcctggggggaggaagagcagctaggaggtcccagaggtttgccccaccctgccccgagtgtctcattttaggtagcaagtgatacatcattttcaataaaccagctggatatcagttagacaatttcacgtgcatttaatttacccttctgctgaaattatggcatggaaacattatttttctttgccagttctctttgtcccctttccatttctcccaccctctcctcttcccaccaaagttactttcctttgttatttttggtataaagaattttccttcaattaatttcaagccttcagaaaagcagttaaaagaagttgagttggggagaggtatttgatcctcttactacacacatatagccctacacctgtggaattgaactgagtaaaaatggatctgtcttttcgtttgttatttaatgatagtctttacattttaatggtgagtttagaccatctacactgtgattattgagatattaatgttatttttaattttcgatttatcattctttctttcctgacttcttttggatatttcaaattttctttattccaatttttcctctcaattgcttacataatccatatcttttgttttagtggtggtacttgcaactttaaaatacatacttgatttaacaaagtctaatattaatatattcagtcttctgaatagcataaagaccttaggaactttaaattctgatctcagtcttccatcttattcctgttgaaaattttagttccactctgttttaaacaagtttgttaatgtataattgacatatgataatccacacatatttaaagtacacagtttgaggtcttgacatatttatatacccatgagagaatcaccacaatttttaaaaaattcatttttctaaaaataattaatccaattcacacacaggcataactggttgcatgttaccaaggtctgctagttttttgtaaacttgttttacttaaagagttctgtagcttctacacaaaagtaactatgataatcaccattcgtcaaagtctaccaggcattgtgctaagtgctttctatttttttttttttttttgagatggagtctggctctgtcacctaggctgaagtgcagtggcctatcttagctcactgcagcctctgcctcccaggttcaagtgattcttgtgcctcagcctcccaagtagctgagattacaggtgtggatagagatggggtttccttatgttgaccaggctggtctcaaactcctggcctcaagtgttccacccgcttcagcctcccaaagtactggggttacaggtgcgagccgccatgccggaccgctaagtgctttcttcacgctaattatttcccattgttttcttcattgttttaaatttttaattatagacataatccaagtttgttataaatgaatatactcaactaaaattagtcatatttttttaaaaaaacctggaaccctctttttttcttcaaagtggatatatgtttatggtttgttgtcactgcagatattttatgtgcatttgaaaacatgctttattgtaataaaaatggggctaaatgcatagtgtttttttcagcccactttttaaacttactgcatcaagaccatctttccattacatctttttcatggctacatgatgtatacagctttgaatgaatgcattaagattgttttgatgaatcgcctcttttttttaggttccttccttcctttttttttgatattacaaatgtcacgtcatttttataagataaaatcctgatgcggaatgcattatttgcaaccctcactgccaccctttgagttgggtattatcatttccctttcacaaatgaggaattttattcttaaaggcttaagtgacttacttggctcttacgtgactgattggggaacgagaatcctggtttcctgttcctggtgggcagtgttcttaaccctcaccacactacctctcctactacttcagaaaatggttaaaaaaagttttaaagtatatttatagtgaaattgtcaggaggattactgagaattttcagcaaatagtcacctatggaattagaatgcagaggacatatttcaggcaatttatattttcacctggcccttcaactgaggactctgacgtgagtgctgaggagctatttatagcaggtgacttttgcgcaccctggggaggttgtgaaatagctgtctatcacaggcagctaggaactgcttgcccacttttttttgttctgaaagaaaggatacagaccatctgggccagtaagttgggtccaaaatcggacttatgtttattttacttaataaatgtgttcttgaatcgtatgagttgaattttggttggttgaatgccatttttagtgcaccaggggtgcacacatttcttgtaatcctttaatgagtagctttctaaaacaaagaatgctttggcaatgtgaataattttcccttaatttatattgaatataatttatgattttttttctgtgcagcagggaaacttgtgctcagttgtttgtgttttagagcgtgttggctggtgtagccatatcagttaacagtaacatggaatatatatgctattaaaaatatagacagatatattgcaacctctcactacaaagccccagatcaaactctgtggtgaagccgtgtaattcagaagaggtgggtataggtaaaattccataccaggaggagtatagctgtagacactgggtgccccttgtccctgtttagatagtggaccctattcctgcctcagatggtatgtggaagagcgggctcttcagttaccaaggccacagtgcagaaaatagggtagaaacaagtgagaaggtaactgaccctttttccaccagcaccattgcatgctgtgaaagtataataaagtatttttagtccaaccttaacatttttgtccttaatagcacatcagttcacatttgctcattaaaataaattgtttttacccactcggcagttgattccatggcctcagtgatctttagagttgatcgaaattgtggtatgtgcagataataaggactaactgggggcaaatagactctaacttttaactttgacaaattttaatcagttagatttaagatatattttttaaaaaattatgattctacatgaaaaaatctaacatttttaacataaatgatttcataaatatgcctggtgggatataatgctgaaataaattttaatgcctctcatattacaatcttgatcctcaaagtggacatttctcggacttttttttttgagatggagtctcgctctgtcgctctgttgcccaggctggagtgcagtggcgcagtcttggctcactgcaagctctgcctcccgggttcaagccattctcctgcctcagcctcccgagtagctgggactacaggcgcccgccaccacgccctgctaattttttgtatttttagtagagacagggtttcactgtgttaaccaggatggtctcgatctcctgacttcatgatccgcctgcctcagcctcccaaagtgctgggattacaggcgtgagccactgcacccagccaagactttttaagtctataactttgcattgcttttagttcatttttggaaaaataactggaaatatagagcattaaaggtaaacaaagccaaacactaattaaagtggtaaggacagattttaatcagttttaactattataatagggaaaacagtctagtgtgaactgagctcaactttgatttgtacagaagtgactgggcatttttaagggagaataagggagtggtgaggggacaaggagggcttcagtagagtcaggaaagtgaaaaattacaaagggttgatcagtataaatgcaatgaagccagctgtgtctgctcgctgaaagttgctgaagttaggattctgtctttccagagagactgggggacagaggccttatcctctggtgttgactggaacaagcaataaatttttttggcagccttgagttctctccagttctctctaaactccatattagaatttgttcaagcctctataggacaggattgaggcctagttgagaagagagctcagaggagcctggctagagttcggtcaaggaaagaatgtttgtcaattgtaaatgaataactttgcaatcccaatactcccaattttggaactttatacaatggaaataaaagcattagcaactaaagatacatgtaccaggatgtttagtgcaacactgttcatagaagtaaaaactgggaacatttcaaatattcagataatgaataaactatgatataactatactgtggagtagaatgcaactattaaaaagaataaatcaaatctatatgattgactttggagccaatatcaatggccatgatacattattaagggaaaaatcaatttacagagtaatggggttttgaaagttgcatttgaaaatagaaccccatacatatatatgtaggagatacctttttctatcctatattggattttgatacaggatagagaaagatgtgtgttatctcagtgaaatgagaatggataggaaagagggttattacatttttccttatgtatatgtctgtactattcaacttgctacagtgggcatgtattgttttttagatataattttttttttttttttgagacagagtcttgctctgtcacccaggctggagtgcaatggcgcgatctcggctcactgcaactttcacctcccgtgttcaagcaattctcctacctcagcctcctgagtagctgggactacaggcacaagccgccatgcccggctaattttttgtattataatagagacagagtttcaccttgttgcctaggctggtcttgaacccctgagctcaggcaatcagcctgcctcagcctccccaagtgctaggattatggacgtgagccaccgcacccagccagatttaagtattttataacataaatcacacacacaggagtcctgctcatcttattttataaaaggaaacaagactatgtgataatgtgagtattctggccattagtttgtaagtctaaaaggatttacaggaattcaaatacctatcaaacttcactgcttaggttgatagttttcgagtgttgcaatccatgctcctctgcattgatttctcactgccacgcgtttatttccatcaaccaagaagatttattgagctttataccactgatggtctgtattaaggaatcaacacccatccctcacttccaatcccttgcctctcaatttgagaagttttaccccaacctaaacttatctattactttttattcatgagactggcaatcacaaagatgagctttgagaagactccttttttaaattaaaacgttagggaaaactggaaatttctctaccactattttattttattttattttttgagacagtctttctctgtcacctaggctggagtgcagtggcacgatctctatttactgcagcctccatctcccgggttcaagtcattctcctgcctcagcctcctgagtagctggaattacaggtgccgtcacgacactcagctaatttttgtatttttagtagaggcggggtttcgccatgttggccaggctggtcttgaactcccaagctcaagtgatccacctgccttggcctcccaaagtgctgggattgcaggcgtgagccaatgtgcccagctcctgccactttttaaaatgcgtttctgaaagtgctttcttagtttatgccttatgatctacaaataagaaatcttgtagcaataatgttagatcctcattcctcagcagattcttactctgctatggattcccaggaagccgtaagaatattttatccaaaagttttctacacacaaagttataagtaataccgagactacagtcaaaagattgagcaaatacagtgtaagtaaatcatggtgctatttaagaaatgtatgacaaagggagtgatactccagaaaaggcgtggaataatggaaatgaggttaaaagcccaggcctcacgaggttataaccaagaggctgtgatggttgaattaaaacttgagcaaggggtttggcactaaggctggaaaacaggacttgcagttagctagctgggtttggataacctggtaattaaagtgaagagcaaaagcgattaactggaacattgacattgtttagaattatgtacaatgttgagcagatggatttggtatcaaattaacatggctattttataattacagccatgatgtaaaaattcattcatttggaaagaggaaaaaaaaacaaatgaagaaagaaagtgagcatcattctccagccagtgctagtgagctgccatgtgaacccagaacagcttagtggactcaaaaggaggcctgtgttgattgttgatttagagtgaggctgtgatgcaaagatgagaagaggcagaagaagcctagagtttgcatttgagaacaagaggatgtagaggttttttttttttgtttttctttttttttttttaagacagagtctcgctctgttggccaggctggagtacagtggtgcgatcggcacactgcaacctacacctcccgggttcaagagattctcctgcctcagcctcccaagtagctggaattacatgcagccgccaccatagcccggctagatttgtatttttagtagagatggggtttcaccatattggtcaggctggtttcaaactcctgacctcaggtgattcacccgcctcagcctcccaaagtactgggattacaggcgtgagccactgcgccggccagatgtagagtttctaactgcacttttcctgtgattctcacgaagatcaaattgcgcccccacctcatgcattaagctatcacacatttcaagaaaaagaatttaaatatttactttgtgtcatttatccctgaatcagctttgtagttctgctttgaaatagcaaactatactaatgcttgaatagaaaggaaatcataattctgaaaattctccttatagtattctctgcacactaaaatgattctcagaagaaatgcagaggttgcctcaggatttttatttatttatttatttaactataagaaactcttttcaagaatgaaaagaatcctagaatcaacagtggcatttcagaagatctagattcagattaactttaccactcatctgcgtttataggagtgagagcctcaaaaatgaatgaaacttgctgtcaaatcaaatagttttggaataaaaataattgggggagaaagctgtgtgtaagtaattatgctaaacaaggtgttttgtggcatgaacgctaaattttccttctcaggttttactgaatccagcttcagctagaaatctaggctagtttatagaagatgattagatggacagagaatgttaagagagaaacactgccataaaggtaaattcaagtgaattataataagtaaatgcatttatgctaaagctagtatgttttaaaaagtgaatgaagtttaataaaaagaaagaaaagagaagagataaaagacagggaaaagaaagagaactgaaaggggaagatgattgttaatctggaccaatttgtctggaaatttgggagtttctccaggatgctgaagaaagggggcccacagaggctggggtgtagaggcctccagcagccctcctctggtagaagctgtctgctccttcactcttttttttttttttttttttttttgagacagagtctcgcactatcgcccgggctagagtacaatggcgcaatcttggctcactgcaacctctgcctcccaggttcaagcgattctcctgcctcagcctcccaagtaagctgggattacaggtgcctgccgccacacctggctattttttttgtatttttagtagaaatgtggtttcaccatgttggccaggctggtcttgaactcctgacctcgtgatccgcctgcctcggcctcccgaagtgctgggattataggcatgagccaccgtgcccagccctttcattctttttatttgtacatgtgcatacctcattttaccatgctgtgctctattacacttcacagatactatgtttttttacaaattgaaagtttaaggcaaccctgcatcaagcaagtctactaggaccatttttccattagcatgtgttcacttcatttctcattttagtaattcttgcaatattcaaacttaataataataataattattattattattattattattattagatggagttttgctctgttgtccaggctggagtgcagtggcgctatcttggctcactgcaacctccgcctcctgggttcaagtggttctcctgtctcagactcccaagtagctgggattatagggacatgccaccacacctggctaatttttttgtattttagtagagtcggggtcttaccatgttgcccaggctggtcttgaactcctgagctcaggcaatctacccacctcagcctcccaaagcgctgggattacaggtgtgaaccaccgtgcctggtcttaaattattattatattttatatctattttggtgatctgtgatcagtgatctttttttaaaaaaaaaaaaaaagatagggtcttgctctgtcgcccaggctggagtgcagtggccaatcacagctcactgcagccttgacttcccctgctcaagtggtcctcccaccttagctacccgaatagctgggattacaggcacatgccgccacaccaagctgatttcttttcttacattttgaagagatggggtttcactatgttgcccaggttagtctcaaactcttgggccccagcaattgtcctacctaggcctctgcaagtattaaatgtgtgagccaccatacccagcctgtgatctgtgatctttgatgttactattgtaagtgttttggggcattccaaagcacacccatattggctggcaaacttaatcaataaatgctatgcatattctgactgctctacaaactggccatttccccacctctcttcctctcctcaggccttcctattccctgagacacaacagtattaaaattaggccagttaataatcttaaaatggcttctaagtgttcaagtgagagaaagagtcacaattttcttactttagatcaaaagctagacatgataaagcctagtgaggaaggtgtgctgaaagccaagcctcttgtgccaaacagccaaattgtgactacaaaggaaaagttctttaaggaaattaaaagtgctactccaatgaatacatgaatgacaagaaagcaaaacagccttattgctgatatgaagaaagttttagtggtctggacagcagatcaaaccagccacaatattcccttcagccaaagcttaatctagagcaaagtcctaattctcttcaattctcggaaggctgagagaggggaggaagccacagatgaaaaatttaaagctagcagaggtttgttgataaggcttaaggaataacactatctccataacataaaagtacaaggtggaaggccgaagagggaggatcgcttgaacccaagagtttgaggctacagtgagctatgatgacaccactgcactccagcctgggcaacagagcaagaccctgtgtcaaaaataaataaatgaacatgttattaagtaaagtacaaaatgaaatcttaagtgctgatggagaaactgcagcaagttatccacaagtgctagctaagatcattgatgaaggtagctacattatacaacagattttccacgtagttgaaccagccttaaattggaagaagatgtcatctaggactttcatagctagaaagaagtccatgtctggcttcaaagcatgaaaggacaggctgactcttgttaggggctaatgcagctggtgactttaagttgaagccaatgctcatttgccaatctgataatcctagggcccttaagaatcatgctaaatctattttgctttttctctataaatggaacaacaaagcctggataacagcacatttgtttatagcctggtatactgaatattttaaccccactgttgagacttactgctcaaaaaaaaaaaaaaaaaggaaggattccttcttactgctcattgacattgtagctggtcacccaagagctctagtgtagatgtacaaagagatgaatgttgtttttatgcctgctaacacaacatccattctgcagctcatggatcaagaagtaattccaactttcaagtcttattatttaagagacacattttgtaaggctatagctaccatagatagtgattcatctgatggatgtgaccagagtaaattgaaaggagcagaataaattgaaatccttctggaaaggattcactattctaggtgccattaggaacattcgtgattcatgggaggaggtccgattattgacattaataggagtttgaaagaagtttaccccaaccctcatggacgactttgaggggtttaagatttcagcggagggggctgggcatggtggctcaggcctgtaatcccagcaccttgggaggccgaggcggacagatcacctgaggtcaggaattcgagaccagcctgaccaacatggtgaaaccctgtctctactaaaaatacaaaaattggccgggcatggtggtgggtgcctgtagtcccagctactcaggaggctgaggcaggagaatcacttgaacctgggaggtggaggttgcaatcagctgagactgtgccattgcgctgccgtgtgggcaacaagagggaaactctgtatcaaaaaaaaaaaaaagatttcagcggaggaggtaactgcagatgcaggggaaacagacataacgctattgcacacttaacagactacagtatactataaacataagttaaaaaattttccgtgacccaggtttaattagaagaggatgagcaagtctaggaaaacttctatggctgctaagtcattctggggaggtaaatgctcagggtttgaagtcagacagacctgggtttacatccctctttgctgctcactcgttgtgggcaggctagtcaacctcacgaaaagtcatctaggggtaataatagcatctccttagatcattaccatgaggattaaatgagtgttttgcacaggtgttagcttattatatattagtaacatactaactatatatatattaataaattctacttggtattatatataataattatgattacttctatatgcctttctacatgttcctcttttctcccagagagatttcaggtactttgatgaattcctaaaggcaatgcacattgaacaccggcactatatttttttcagttattgatattggtttgtttgattcaggagctttagaggttgcaaagtctactctctgatgctttcaaaaatttttctttctttttatttgttacaggcatgtagctagcacaactcttataatgaactgactgtgactgggtgcttaccctggcccacacatagttcaaagggaagaacaagaagggtagagaaatctcccatgatttttagacaagtgttgtaagaaaaaaagagaaggtatcaaaaaagtgtatgtgtctgaaaaagagattgcacaagatagaatttactgagctggaggaatatgagagaatgttgcatacaaagtctcctaaaaggaaaggaaggcagagatgggatgagatgtggtatgtgttagtgcttcaaattaacagcaggttttgcgtcccaacttgacgcagcttgtgtggaatttggtgtagggcaaatggacccacagcttcaggagggagctgctagcaggggaagttgtactatctgacagtgcctatatgagattggtaccttttgggaatttctacctaaggcggtggctcagataggcacaaaggcccattgggacctccctgagaaacagaataagaggtgctcaggcaagaccacacttccgccctcttcctgtatccttgaaacctttcagagatttgctgtcaaatattgaccagaaagttaaagaagcaagacttgggaaaaagtgactggtttttctaatggatggtgaggctttttctttctttctttctttctttctttctttctttctttctttctttctttctttctttctttctctcttagtgtacatgatttgtttttttctctttgtgtagatgattgaagtacttaagtgtctttgtaagtccagtatctcttttcttattttaaaaagatctcattaaaaaatgaactaataaatatttattatagaaacagtagataaatgctgatgagcataaaggaggaggaaatatatgtgacccccaactcccagaaataatcactattaaaaatttgatatataatgtttcagatttttaatatattcacatattttcttagaaaaatgggattgtactgaataaacttttgtaacttttatatctcacttaatcgatgctgaatatttttccatgttactaatatgcttcaacatttttttttttttgagacggagtctcgctctgttgcccaggctggagtgcagtggcatgatctcggctcactgcaacctctgcttccgaggttcaagcgattctcctgcctcagcctcctgagtagctgggactacaggtgcacaccaccatgccgggataatttttgtatttttagtacagacagggtttcaccatgtgggccaggatggtcttgatctcctgacctcgtgatccacctgcctcggcctcccaaagtgctgggattacaggtgtgaaccactgtacccagccacttcaacattattttataattgcatagtgccatatcttatgaatatgttctaatttattcaactacttttggcacctagatgtttttctaatattttcttagtataagtaatgctgcgtgaaatatccttatacatatgcaatccatattcttttcttaggatatatttctagaacaggaactgctgagttaaagggtattcacattttaaaaagcttttgacatacattacaaaattatcttcctcctatgttgtacgatttatattctttctggtagagtatgaaggtgccattttccaaacctcctgccaacactgagaattttcgttttttcatctttgtcaagtttatagataataaattgtatcttatcgttgtttaatgtatactccttttttagggaagctgactttttcatgtgtagattggtcatttatgtttcttcccttgtgaactatttattaatatccagttgttaattgtaaatgctatttatatgttaagaccattaaccctttaccatacgtatttcacttttgaatctcattttattatttgtaggttaattttgattaccgttggattatattttacatatatgttttatattttatggtttaaatcgtgaacttttatctttatagctccttctgttgtgactgtgattgaaacgttttcaggacaaaagtatttaatcatgattaaaacaattttaagattataaaaccaatcatgtgattctcttcaagtttgtatgtgattttttttttttttttgacatggagtctcattctgttacccaggctgagtgcagtggcgcgatcttgactcactgcaacctccacctcctgggctcaagtgattctcctgcctcagcctccctagtagctgagactacagatatgggccaccatgcccagctaattttttatatttttggtagagaaggggtttcaccatgttgcccaggctggtctcaaactcctgaccttagatgatctgcccacctcggcctcccaaagtgctgggtttacaggcatgagccaccgtgctgctgtacagcgtttttatgtttaactctttagtctaacatgcttttactttgtgtatggcatgaagtaatgattgcatcttaatttttccgaatagttaatgatttaacctgtttttgaatagtttattcttttcccactgggtttaaaaaccatattgaacaaatacaataaacattttactgtagttcttctatgtgtatttctgggcttttggctctgttccattgctctagttcttttggcactagtaccaaactttaaattcacgttatttttagcctatttagtacctaatatctcccttgtggttcttttctaaaattttctttaccattctcagttttttattctttaaaataaacttgaggatttttgacctgtttgaaaaatttatttgggattttaagcaaaatttgattatatttataaattaatttgagggagaattaatatatttacaatgttaagttttccagtacagaaaaactttccaatacagaaatgtatcaaactgtttttaattttctcagtaaagttacatttttaaataggttattcactttttttattcctagaaatgttattgttgttgttgctattataaataatactataactaagaatttttttttttttttttgagatggagtctcactctgttgcccaggctggagtgcagtggcgcgatctcagctcactgcaagctccgcctgacgggttcacgccattttcctgcctcagcctcccgagtagctgggactacaggcgcccgccaccatgcccggctaattttttgtatttttagtagagacagggtttcaccgtgttagccaggatagtctcgatctcctgaccttgtgatccaccctcctcggcctcccaaagtgctgggattatgggtgtgagccaccacgcccggccaagaattattttctattatgttttctaagtttttgtgggttatatggaaaatttcatatatttctgtataattgttccgtggccagaacaattaattttgtatacttattttgtatatttatttgtaactgttcacctcactttttaattatttagaagcaaattttagtttgttctattgagaaaatgaatattactcaatctgcaggttgaatacttttgtctccatttttctcataaaattcttctttagtttctttttcttgcctggttgcagtggctcaaatgtctagaacagtgttaaatggatggtagtgataatgagcatgcttttcttgtttctgattttaacattaatacttccagtattttaccattaagtatgatgcctatgtttgatttgagatttgaattaacatgagtatcatgttaagaatcagtcttttaattttgttttattaattaaaaaattgatattgaattttatcaaatgatttttcaagattattgtggcaatccaaaagtttttctctgttgcccagtctggagtgcagtggtgtgatcataccttactgcagctttgatcccctaggctcaagtgatcctcctgcctcatcctcccaggttggtaggactataggcatctgccatcacactgggctatttttttttttttttttttttgtagagatggagtctcgctatgttgcccctgctgatctcaaactcctggcttcaggtgatcctgccaccttggcctcccaaagcactggggttacaggggtgagccactattcccagccttattttttacatctttagggcaacctatgtttacgtatgaagttagtctgtggttttctttattatgctttatcagtttttttttttaagacagggtattatgttagctttctgttacttttgtccacttgaacacttcatataccatgggagttaattctgcttgaagctcagttagaacttgattgtgtaagtaatctgaactaagagctttttttggaaataattccttattaacttttacatttttccatggttactgatctgttgttttttgacttcttcctgggtcagtttgcttctaattattattttggctatgtctcccaatatttgatatgtggtattctcatcactgaaaccttctaagcattcattctgtaattgtgtttttaatttattctccaatcaatgatttttttttttaagaactctaaagtttccccaagagcgtggggtctttttgacttacacttttgtaattaatgtatagttttattacagtgtgatcacagaatatggccaatttcttttggaaagaaattacttacaatttttttttggtagcctaatataaaatcaagttttgcaaacttttcttatatttttttcttaatgggctagacagaagatccttctctttaattattcatttattcatcgaggattgtttccaccatgtgtctcatacatgccaggcattgtattaggcattgcaggatataaaataagtcataagctttgtcttagattggtaaagtttggatggaacacagacacatgtagacctaattataatacagaaagaaatgcaaccgcagcgaaatgtacaaaagcagcaggcagctagagtgggagtgaagccctgaaggttctgggaatacaaagttgcctacgatggcccggaggggctttcagtcctagcgtgtaaaacatacattgagatcagagacaggctttttggaggcaaggtgattaattaggaaatcaccgcagaccttcagtaataaatcagaacatatgaggggcggtaagagtgcaagatgagaagagaggattttcacacctaaggggcagatagcggaagagaagcccagacctgaggatgaaggaggtagtagtaaaattttatagacgccatgggagagcttttcaaggggtggttggtcagttgggacaaatagagccaaaaggtcaagtaagatggctcacgcctgtaatcccagcactttgggaggctgaggcgggcagatcacgaggtcaggtgttcgggaccatcctggccaacatggtgaaaccccgtctctactaaaaacatgaaaattgccgggcgcggtgggtcacgcctataatcccagcactttggtgacagagcaagactccgtctcaaaaaaaaaaaaaaaaaagcaaaaagtgtcggttgcctttggtctttggggacttggaaagagcagtttcagtgaagtgagggaaaaaaagccaagccacaagtaggttgagagtaaatgggatgtgagatggtgaagacaagtattttttcaggagtttagttgtggagggaatgcaggagttagggcagtaattaaaagagcaagtctggctgggggcagtggctcacgcctgtaatcccagcactttgggaggccaaggtgggcagatcatgaggtcaggagatggagaccatcctggctaacatggtgaaaccccatgttactactaaaaatacatgtctctactaaaaatacaaaaaattagctgggcgtggtggcgggtgcctatagtcccagctactcaggaggctgaggcaggagaatggcttgaacctgggagacggagcttgcagtgagccgagatcgcgccaccacactccagcctgggcaacacagtgagactccgtctcaaaaaaaaaagcaaaaaatcagaaagactgttgttaggatataaagacaatgtgagaacgtgagcatgtttagctaatgagcgcacgctgagagcaagagaaggcgtggttgttgtcgagagtcctaagcaggtgggagacacagggtgagacacaaagccgaggtaggaggtggcctcttgacaggaagagggcacctcttcttgagtcgaagacaatgcttggaactggtagggagtgtgggcagaaagatgggatctcccccatttctttgcaaggctgtgttattgtagaacctttagtcacactcctggactctgactgaaagggtcctgggtcttggcctctgtgttaacagtttgcttcatagggaggattgaggatccatcccttcctctcctggctatagaactagaaaagaacctctacaccagtggtccctaatgtatttggcaccagggaccagtttcatggaagacaatttttccatggaccgggaatgaggggatggagatgatttcaggatgaaactgttccacctcagatcatcaggcattagactctcataaggagcatgcagtgtagatccctcgcgtgcacagttcacaatagtgttcatgctcctatgggaatctaatgccacagctgatctgacaggaggcagagctcagatggtcatgctcccttgactgctgctcacctcctgctgtgcagcctggcctctaacagaccatggacaggtacctgtccatggcatgggggctggggactcctgctttacacttatgatgtagtttggatgttgtgcccacccaaatctcatgttgagatgtaatttccagtgttggaggtggagcctggtgggaagtgattggatcttaggggcagatttctcattaatggtttggtaccatcctgttagtgctgttctcatgatagtgagtgagttcttttatttatttgtttattttaagacagagtctcactctgttgcccaggctggagtgcagtgcagtggtgcggtcttgatcttggctcactgcaacctctgcctcccaggttcaagcacaccaccacgcccggctaatttttgtatttttagtagagacagggttttgccatgttggccaggctggtctcaaactcctgacctcaggtgattcaccctcctcagcctcccaaagtgctgggattataggcatgagccacaacacccagctgatagtgagttctggcaagcgctggtcatttagaagtgccccctgtctgtcttgctgctgctctggccatgtgactcatctgctcccactttgccttccaccatgattgtaagtttcacgaggcctccccagaagccgaacagatgccagtatcatgcttcctccatagcctgcagaaccatgaaccaattaaacctcttttctttataaattacccagtctcaagtatttatagcaatgcaagaatggactaatacaacttaactttcctgaggctgttgtcgctgttgggcattgaagagtttctagaagtccctgtttctttatgtggcatgcaatggatcatcagaataattaacccagtcaatggtaaacaaagtgatggatggatgccatcagatcacaaaagtttctattactgtaaatacaagggggtaagtaaatcaaaataatgtttcaaatcctcagtaggcctctttttctgtttctaattgaagattgtcacatcaacacataaacaaaaatgcctgtgagggaaatgtgtattttatgcattgcatttttatatctgaagtttatttctattactaacttgaaatgctgaggaagggatttgttttggtgcttacaaaattctcccatttgctcttcggactctcacaagttgacaacaaattactgccctgatagtatggtgagactgagggttttttgtctttttctcttattctagaaaacactgtatcctctatatggagggaaatttctggtttgattaacactgtaaataattatgagacaaagcctaaatataaaagattactcacacaggctcttacactgagtaagatattatgtgttaaaaatcagggttaatagtttaacaggcacattatggttcagaaatcccctgggggacttcaaccatcttttctggatgttcactttgccaaataggctgcctctatgtcatatctctacctgaagggcaggctcagacactgattcggggaagtgtcacccttactataccaagaagtcagacatccaaggtcagacactacgtaaagtcagatacttcaagggctttccttggaagggaggatgaaaagggaagggtgggaacatcagctcaggtgagacatatgaattcaacaaaacatcagggatggtttgccacgtttgcgagcagcacagaaaacggcagtttgctccaagttcccagcacaccaaagggggcagtagtgcgtctgtaaagcgcgttgtcaacttggtgataatttctgtttgcattcacactcgccggctgataatctcagctgctcgatgcaattcaacagataacaatgcggaagtttggtctaaagctacctgaaatcacttccaagagctcttcagataaagctgcctttgatagtcttcattaacccctcccatatttgcccctcagcgtcccttggcttagcagccccggcctttgaagtccaacctaagcattcttagatggtgagtgagggtctgccttccccagcaccagccacctagtcaggcttgtggctcgtctaacaaactggagcctgagattctgagaaaacgaaaccaaacagttgtactccggggttaacacagagcaacttccacctgctgtgcgagttggtgatcctctctcttgccgttcgagagccccagtgaaacttgagtgagatgagagagcatggagcctgccagtctccccctctgcgcacacacacacgcaaacacatttaactttccacttgcagtgacctgcccttcagtgtgacttatcagctgtttggcttttgtcactaaaggaaaacaaattgtggaatatcccgctctgcatgctcatgagatggctgagccaactcaggggttatgaggtggtttgcgagtgaggagaagaatgatcttcagtttctgacctcctggcacggtggcgggcggtatttatcaggaggtacatgtgactggttaagactcagagccccagcttgaaggaaacagctgctctcggcgtgctccggcacttggcagctggacaggcagagtgctgatgtgaaaaataccacgacaaaaccaccctagtaagtaactggagaactttcctctctctctctctctttcattccctctccgtgtgtgtgtgtgtgtgtgtgtgtgtgtgtgtgtgtgttgcaagccaccaacaacttttgattttgattttggtttccctctggcacgatagaaggagatattttatttgtacctgttaacagccattggtgttttcacagcccttttttagaacctgttattttcggcaacgtgtcttgtaactttgaggatgaatggggcatatggcttcattcctgtctaggaaacagaaagtttgtttcccagtgttcaagatttttctagtccatggtgtttaggttcaaagtcaagttcaggttatgaagtagagacttcattgaagtgagttgatgactagatttgattttaatctgtttctaccactgaaacctgaaaacgtagttgtttaaagtaacttgtgaatttattgtatggctgatttgatttttcctattcaatttttgagaatatctcatttaactgtgtagaactgtctgcaatatagaagactgacaaaataatatttagattcacattagaaatcatatttagatttcttgcatggtttccaactaattgaaagctgtattttatagcgactttttttccccccaacaagctaattcaccttcattactttaaaatgttcagttgcccctggtcttccttcaccttcattactttaaaatgttcggttgccgctggtcttccttattttagtgttttcgtgatactcaggctgttttttccttgtttatgacctgactgggaaagtgctgcctgcagctgatgattaactctgggaggcctggcatccaaattacggagagaaccggctccttctcaggttcattcagcagtaatggtgcttgcgcttgggcgagcagcaaagcaggcaccatgctggaactgagctgttgttcggtgacttttgtccttccttggtagtcaccagacagaatgcttcagaggaaaggcaaaaggggaaaagagagagggcagagctctaaactgatgacgtaaagctctgaaagtgacaggtctttgaatcagaggctgcagggagataaccaaacaggttcctgtttctggagatcgcgtggatcttgaggagggtgggcagagaggggctgtttttatttgaagtctcaccaaatagttgttttgcttgtgataagcctaggacaacctggagtgcgcttgtttcctcgtgtgacaaatggattctcatacaggctcaagctatacggttttctttcgccctctgccccctgccatgagggaacactgttctctccccacccttaccatcctttgttgtttgtggagaatggattaaaaatgacccagggcacggcacttctgcgatcgagtttccctcagcacagtgggtcttgagtaccgcaccaaccaatgttctctgatggaagcagtttcggatgccctgtctaaacaaatggctagtctgacattgagaagttctccaccttcttttccttcaaatgtagaagaatccacaaaatgtagagtggccaatgaggaaaaatagtcccaacttctctgttcctcggtatggcatttgtgtgaggtccttgggtcagcccgcggccatgtggtctgtgacttccctgtctgactgctgggggagggggttcctcctgagtcattctttagggagtttgttcctggtatagtttcagattttccacaggttgatagtggaagagaaccctctggtgaaattgtgtctccggaatcatcgagcctcccataataaaatggaatgtctaaatgggagcagttgaattatccaactgctgtatttttgagagccaacaggctcctttgaaaaacccatgccttttcaaaatattaatagcaaaataataaaaaataatgattttacttgcagatagtacatccattgactcaaagactttttgacctggataggaatgatagaatgtgcgatttaactctttcgtatcaaagatgaggaaactgtagcaaatttatcggagttacggtgcagagccagaagagagagctcaaggcttccatcataatttcaacgctaataacaatcccttacttttattgtgcacttactctgccaaatgatgcgctaaacaagtgtatttattttcatagtctcctcacaataactctatgtgttacatattattattccagttctatagataggaaactgaggttcttgaccatacgtaacacagacaggagggacacccttagttacttgaccatatgtaacacagacaggagggacacctggatctgactgtagaacctgtatacattaaaaaataaaagtggaatcccacacatttaaatgtaaaaactcacaacatgcaaatgagagtatttccagcacaatatgattacacacacaatgtgtgttatgcccttttcgagctctccatgacaggaagggctaggtttccccctgtgacagtccaagcccaagctctctctataggatcgctggctggtggcatgtttttctctttgaaaatagttcagtgacggtcttgatgttggtaagaacagcaaccgggaactttgttattaacctccagcacacggctcccatgccccttctggcctttccctccagttttcctgtcactcctttcctttggaggacagccactccacccatgccccaccccaaatagctggcttagtgttgataaagctattatcagacccatcccctttgctcagcctggaaggttggttgtccgagtaggttgttgatgaatagaaaccatgcactctgccactctgcgctgtttttttgagctgtgggtgtaaggggtgggtcacggggcaggggactagctggcagtggtgagggaggagaggtatgcttttcttcactgcctgcacctgccatttaccctgagtcctacttctccacacaccagttgcatatctaaagctctgactgtctcacgggtgggccataaacctgtggattttctgggtcatcagacttgcagagcccttaagaaacctgcctcctgaatccttttaaaaatgtcatttggctgtccacattcctccactttaggttaagtgtcaaaattagggttggagataatgggaaagagcaccaggtagtatgtaatcaacagggaaccttttattaatcaggaggaaaatcaagcaagtatgccatgtgtggatgtttctgaggaagttatcagtgtttctgcaaggtcgttctggcaagattacacattttgaagatcaagctatttatagcatgaaagaggaattttttttttttttttttttgagacagtctcgctctgtcgcccaggctggagtgcagtggtgagatctcggctcactgcaagctccgcctccaggattcacaccattctcctgcctcagcctcctgagtagctgggactacaggcgcccgccaccatgcccggctaatttttttgtatttttagtagagacggggtttcactgtgttagccaggatgctctcgatctcctgacctggtgatccacccgcctcggcctcccaaagtgctgggattacaggcgtgagccactgcgcccagcccgcatgaaagaagaatttttaatctttaattccacctgcctgctgcctctaaaactaagcccaactcagtagtagtcagtgatgtggtttgctagaccaaaaccactgggaattgcctccaatccttgctaggaattgctcacttctgtagaaattggctttgtacagggggtgttatatgggtacacgtgaagtggactcagaatcacgacagagtccacaagtcatactctggagctgatttgaaagaaaataaaatgcttgattcgttttggggtccttttacaataaggaaacacattctgggatacaatgcctattttgtttctttgtttttgcccaattgtgtgtttcaaagacatctgcttccaaaaagttaactttcctggatcctcctttcccttggtattgattgctcacttatagtccctggagttaacagctcctgtgtcatgtttccactgctctatgggatttgaagtctttggatttttttgctgtttcaagtgattattatagcttcagagtctgtggtgtgcagagtcgctgtgctttgatctttgagctcatctttggtattgagaagtcgaacccctgcatttatatatgccggcataaggcactttcttgtaccttgccataatcccatgaaagagggagggtatcatcaccattgttttcaaagaggaaatagaggacgagagaaaatgagtgacttgtctatggtcatgggaaaagtaactgtcagagctcaactatatctcttgtctactgactccaagtgccaggctttttctgttggttatgctatctttcttttgttttgtttttgtttttcagatggagtttcactctgtcgcccaggctggagtgcagtggcacgatctcggctcactgcaagctccgcctcccgggttcacaccattcttctgcctcagcctcccgagtagctgggactacaggtgcccaccaccacgcctggctaatttttttgtatttttaatagagacggggtttcatcatgttagcaggatggtctcgatctcctgacctggtgatccacccacctcggcctcccaaagtgctgggattacaggcatgagccactgcgcctggcctagttatgctatctttcaaagaaagaccaatttcaactatttcatgaccatgcacttacacaatctgtggaattatctttggtgataaaaagttgtgtaatttgtattctcttcagataggcaaagagtgactggataaccgatttgcgacatgccactcatgatatttccaaagcctatggacatttgactttggaaacagggtcagcttagtcttcagacaccgtatttgcttaggataattttgtttgtttgttttttcagacagagtcccactctgtcacccaagctggagtgcagtggcacaatcttggctcactgcaacctctgcctcccaggttcaagcgattctcttgcctcagcctcctgagtagctgggactacaggcgtgcaccaccacacccagctaatttttgtgtttttagtagagatgggttttcaccatgttggccaggctggtctcgaactcctgacctcaggtgatccacccaccttggcttcccaaagtgctgggattataggcatgagccactgtgcctggctagcttagggtaatattttttttttttttgagatggagtctcgctttgtcgcccaggctggagtgcagtggcacaatctcggctcactgcaagctccgcctcccaggttcatgccattctcctgcctcagcctcccgagtagctgggactataggcgcccgccaccatgccgggctaatttttttgtatttttagtagagacagggtttcactgtgttagccaggatggtctcgatttcctgacctcgtgatctgcccgcctgggcctcccaaagtgcttggattagaggcgtgagccaccgtgccgggccgcagcttagggtaatgtttttaaaggaacttagtgatcatttttctgtcttgaagactcatatagtcaagttggagttataccaactatggcatgatgtaacgttaccttttagagacaatttggttgtttcctgaggtatgaaaactgcagtctgctcttcagtgtgcacgctccttgcccaacaaaaccatcggcattcttgaaagttctgcctgagtatagcacctttattcctgtggaggtatagtgcattctaactaccatgaatagtgtccactgtgatcatttccctctgcacgattatctgcccacaactgagagagtcttaacttgctagaataatggggacgcttcactatctgtcagtttcccaatatggcaattcagttcattgtatgacagcatcatcagaatgttgccaagatcataaaaatagcagtgcatgttgcctgatgattttacagtgcatattgtcatggccagggcttagaggtaggggaaaaacatgtggacagctttgtgacaagagtctctcttatagtgtttctttctaaagtaactttttctgagtatgaatgtgaaaggtagccttctttgaattaaaaaatattctgaaaaatgtttaatgtctgagctgacttgagcatttttctttagtgattactgtaataatcagaaatttcttcacctttcaagaggacaaaagggaacaactataattaaaaaaaaaaaagaatatgaaatagtaagttaaaagtataccttcctggattatggtctatagaatgtagggtaatagaaaccttgatgcccctattgtaaatggagaattcaactcaatgtataaatgatttctgtgcttgtagatatcccatcttttaagtttctatttgaatagattggtaattttatttcctgaagtcttctctatttgtcaaatgctgccttatctttgttggttcaggtggatcgatctccaccccacaataggttctaagccccttggaaagatcattatgccgttgatttgctaaagtattataagtgttctcagagtttcaactcttagtatgttccaggtgcaactttgacagagaactagtaacatagggaaaaaatatggaaaaaaattaaattcatatctaatcccagaggcatgttttagccactattttttttttttttttttttgagacggattctcactttgtcacccaggctggagtgcagtggcacaatcttagctcactgccacctccatctcccgggttcaagtgattctcctgcctcagcctcctgagtagctgcgactataggcacctgccaccatgcctggctaatttttgtatttttaggagagacggggttttgccatgttgatcaggctggtcttgaattcctgaccttaagtgatccgcctgcctcggcctcccaaagtgctgggattacaggtgtgagccactgcgcccggcctagtcactacttttctgttgttgaattgtttcaaaatcacagacaaataaccacatttgagtgtatgtatgcagttttaattgcttgtccttttcccatctggggtgtttgtactatgctagagaccttaatagttaatgaattgaccaaaaggaggagcgacaagctatggaagaactcagacagagaggtgatcaatctgtgatggaatcagactccattaaaaaaaaaattggcttagtcacttctctgttttgttttgagaaagtaaaaatttcccctccatccagcaattcaaatttggctgaaccaagtttccttggagtcttttacctaaattaactttgggaagataccaggaggaattctttcctaggaatgtgcacacatgggttgcttttcagaactccctagacctggaatgaaaggagtaaagaagaaatgtccttttctggccacactctaacaacttgcttgtgactatcagggatgaatctcttcaagtctcaagttaatatagatttctggagctcataaactactcaagaattttaaacagttttaaataagaattgggtataatctccatatttggttctggaaaactcataccatgagttcaatttgactgaactttgaattctgctcagctttcagttctgttttttaaaagtagaaagtattccacttatgcatggaatgcttgccgttcaaaatcatatgagttgacacgatgctttagagatcattttttttttttatggtaaggacagcacccagtctgaatggtggtgctggagatttctctgtaatccatttctctccccagtcactcttgattctgaaattaatccatctctttctactttccttctcttctaggcatttaaattgtgtctgctattgagagaggaaataaaataacgcttattttcacatcactcagaggtagacagattagcactcttgcagaagagaaaaataaattttagagaagtcatataccttgtagaaggtcacaagccagtgagtaagagtctagtcctagtctgcctggaaacaaagtaggtgcctttttcatccaatcacactgtctctcactatgtctgtgttaaaactgatgcccttggccgggtgcagtggctcacacctgtaatcccagcactttgggaggctgaggcaggtggatcacctgaggtcgggagtttgagaacagcctgaccaacaaggagaaacccagtctctactaaaaatacaaaattagccaagtgtggtggtgcatgcctataatcccaactacttggaaggctgaggcaggaaaatcacttgaacccaggaggcagaggttgcgatgagcctagattgcgccattgcactccagcctgggcaacaagagtgaaactctgtctcaaaacaacaacaaaactctatgaaaagggaagccattctgtggaggtgagattctgctgtccttgtcatgcaattgacattatgtcattgtcatgcctaatacatacccatttctattagaaggatgctgtaggacaaagaaatatccctggactctggatttgtgattgcaccctgcagtcttcttttagcttctacccagaacacactcagtttttattattgaggtgttctctcaactgtgctgccctgcatctttggcagggtgctactgcagagctaagcctttggcaacacccaaaaatcattatgctatctcagatggtgacaggtatgaaaaagatcttgactgttggactagctgattaactagcagtgacagtttgctttaaaatatatttggtttttataagaagtgacataatattggcaccaagagggacaatcatattcattcccatgaaatgtttcttggggccatgattacagatagataaaagggccaagcagaccttgaagcagaaccagtgtaaaatatctcgtgctattttaattctttatgtttttagaaggaatattgctttcaacctctctttggaatttgcgggaactttggttgacttaagccaatgatggtggatttattatgtaagaattgaaggtttgtctttttcagctacaaagatggctgagacatgtgtcatgcataaaattctgcaactatttggaacaccatctcacatctaacttgtggaagagaggctaatatatttggaaaattgttttgagctttaatcgccagttttagaaatttttctcaaccaaaacttcaggaagtacagtctagtagaatacaggatttccatgtaggtaacaaaagtaagggacaacatccagaacatattttcatacaagatgattcacttggtatttcttttcttttcttttctttctttcttttatttattttttttttttttgagagagagagagtctcactctgtcacctagtctggggtatagtggcacaatcttggctcactgctacctctgtctcctagttcaagcgattctcctgcctcagcctcctgagtaactgggattacaggtgcccaccaccaaacccagctaatttttgtattttgttttagtagagatggggttttgccatattggccaggctggtcttgaactcctgacctcaagtgatctgcccacctcggcctcccaaagtgttgggattacagctgtgagccactgctcctggcctcacttggtatttctaaacatatgctttgtgctgcttattgcacaaacatgaagaatatagaatttatcccataggattttactgtttagttaaatagaccaatatttttaaaaggttacaataatcatcttacaatacataaatgtatattctgtaaaagagaatgtttccaaaatattctgtgggaattcagagaaaggagataactaactatatcaggatgaaccagggatgattcccttgggttggtgacatttaagctgggtataaaaggataaaaagtcattgttcaagaagaaaaagactatatttgaaacagtgcattccaggactaatgtgtaacttgatagagctgaatcatagattacatgttggaagagggacgggagaaaaggagcaaagataaggtggttctgggtggttaacagtagtgtttgcccttctgaagcatgtcggtatttttgagaaccgatttatatatggcaaatttcaaccatatataaaaatagacaaaataaatgataattaacccccatttattatctaactttaacaattttcaattcatggtcattcttatttaatttatatatccctaccgatgttctccccttcccatattagctttgaagtaaatcccagatatttcatcattccatccgtaaatattttagtatgtgtttctaaaagataagttctcttaaaaagttcacaacgtcattcagacatgcaaaataattaataataattcttaactattattgtagtttgtcaagtagagggatgacatgaatacatttgcattctggaaaaaaatttctgaaggcaataaggacgacagatcagagaaagaaaaataccaaataccaaaagaagacttcaaagataggtttgaacaaagacaatgataatagagagggtggaagaattttcaaaatgtttaaaaggtaaagttgatagttcttgagattaattgtatttgggtgtgcaggaaaggagggagttaaagaagttttggaggttttaatttgaataatcagcatatgaatatgccattaacctatatagggaaaggattccttgaaaagcagttagcctggttcagcattatacagagactacaggaaacaaatcaaaaaatatcttcctattaccctcaaacaaaagtttgagatttccacctgtagtcctagctacttggaaggctgaggcaggaggattgctggagtccagaagtttgaagccagtttgggcaacatagtgagacctcatctccagaaaacaacaaaactttgagactcagagcatttggaataattctgattgctgcaccttaagaaagccattaatgccagccatggtggctcatgcttgtaattctagcgctttgagaggctgaagcaggaggatcacttgagctcgggaattctgagaccagcctgggcaacatagttgcagacagcagtacacttcattcctaaacatttcatcacgtatatatgtatattaccaactagagttagttattgcagaatttatatttcacacaagagagattaaacttatacatttattttctcaatgggaaaagccgtgattcaagaaagattaacacaattcatggctgattcttactcgattatttatgaaagcaagaaactgagaacctcttgattttcaaaagttgttgccatacagagcagccacatcctactacaaaacagcctttgagtaactatcaagtattgtcctggcaaagcacgtttctctcaataagtgttaattgaatttgaatgtaaagaaactgacacctagaaatgcaagctttttgccagtaactgacagagctggtactagaacaaattacttctaatagtttctcactgagcatcactccttacctctaacaactctgaatagtaataatggaacacagaagatgctttattagtaaaaaggtaatgctttctatatcaagtcattgtgagattgctcaaggctcaatgggaccaagtagctgggccgtaggaaaggaggtaaaatgctctcacaaaaaaagaactctccatacacaatggaaaaaaaatgcctgtgttcatatttatcctctgacttcctccagaagaggattaaagcagctgatgacaaaaagcaaaaataaaacacaactgaaaatgattaacacaggaataaaacaagggccaaaatccaccagttagtcaggcggggaatacatttggacctagaaagctttaaaatgttctcaattatgtcaaattctgacatgttaaatcttgctgattggttcaagaattaaaaatcaagttgagatgatgtctaaaagacatgttcattcaaatgttttttgttgatgaagatatcgagtattcatttggaaactgaaaaactcagtcaaatagccaggcatttgcctacacaagaaacagacattctgatactagaaaagattttaggggtttgaccgattttttttttttctggtttccattttgatgttatggcatcagtctatatcagtggttctcaactgagagtgattttgccttccgaaggacatttggcaatgtctggggacatttttggtagtctctactgggagtggcagtggagtattactggcatctagttagtagagaccaacgatgctgctaaacatcccaaaatgctcacgacagccctgcatgacaatcaattatccaaccaaatatgtcaatagtaccaaggttgagaaatcctgatctatgtgaaacaattaaaaatctcacgcaaacatgccttcaaagacactttagatgagttacatgcaacatttttgcttgtctgctgctgagcagtaagtgatgatggcctaatacacttgcagaaatactgctgcatcggcgtcagggtggagatgagatgtcaaatggccagtccttcagaatgaaaagccaagttgaatggttcacaacacaggctgacagcactctttggtgtccaaaagatcaaatgttggcaggcaaggatactgatatttagtcagcagaaaatattcaaagcaatgagggacacattgttgtttcttttgtgggttttatttttattttttatttttttggcaagatctggctctattgcccaggctggagtgcagtggtggaatctcagctcactgtgacctctctgcctcccaagttgctgggactataggcaggcaccaccacacccaactaatttttgtatcatttgtagagaagggggtttcaccatgttggccagactggtcttgaacttgtgagctcaagcactcctcctgcctcagcctccccatgtgctgggattacaggtgtgagccactgctcccagttgacagattgttgatgaggacagaacaagggatctttaggtcataagtcatgggacagttgatcctgggacttgggaagttcatttctctgtttctggcttttttcatcttcaaaaactcaggaaaagagaactgagggcatcagagcaggctgatttgatacactcttgctgccaacctgatgactgtatatctctatgatttatgtgattctttctcatgttccctttactaattataactattatccatgtttgtaaccatgttcttcttccttctttcatattataactggaacccattctcttccctttggttatcttctcttccttctgagttttcagcttcctctactatgttctcctcatcagtgcatcggtctgcttcagtaactctcatcttttaaaaatatcctttgcttgccacaacctctgccaacttctcttcactgcaattctaaacaaacttgttgagctcatattctacacacgttttctttgtttctttacctctcatttactcttgcactcacaccaaactagcctctgcccacagttctgtaaaactacctttgtcaaggtcaccagtgacctccttgtgttaaattctaaaaaagcagatcatttctctttctcctcttatttaactttgcagtagcattcaacatgattgacagcttcagcttccattctatccctggcctcatggcacagcgtgcttttaagttttccttctctttctctgacaggagctcctcaagatgctttgctgctcctcctcccctctctgacctctagatgttggaaagcccaaggcttaagagtgggtcctcttgtccttcctctttatactttcttccagagcgatctgagccattgccatggcgctaaatgctgcttacctggtgataaatcccaattgtaaattgcatctcagatctttccctggagctccaaattgtatatgtaactgcaactcaagatccacacatagagtttctcatctggcctgtttagttcactgccggatacccaggccctggcataatgtctggaaggtagagacgtatttgttgagccagtaaagaatgatttggatactgggcctaaaacagatacatttttttctgtgacaaggtaagagttagctgcttttgttgtcagagttacacttttattagattaaaagataacatttagagcaggcacggtggttcatgcctgtaatcccagcactttgggaggccgaggcaggcggattgcttgaggccgggagtttgagaccagcctggccaacatagggaaacctcgtctctactaaaaatacaaaaattagctggtgtggtggtgcattgcctattgtcccagctatttggggggctgaggcaggagactcacttgaacctgggaggcagaggttgcagtgagccgagatcgtgccactacactccagcctggggcaacagagtgagactgtgtctcaaaaaaattaaaaataaaaaaagtaaaacttaattgtcacccagaaaaaaaaaagaaacaagatactgtttaataactgcttactggttgatggatagattgattaatcaattggaaatgtattaatacttaatctttttgtattccaacttatttatttataacatagaaataatgctattatttgccaaatcattttaaaggacaaaggtaattgctttttaatatcctgtggagaaagacattaactacatacaaaattgcacacaagatggtgtagagattgcatgtattatcagtttccttagtctggagactgcattgcgtttgcatctgaactcttgtggtttgtgagccaacaaaatatcatcagtcctcattgttataagttttatttgaaagctaccattggatagtgtttttgtgatgtggctagaattatataattgtctatgcagcctcgcagccatctctcagctgccctgcactgagaggtgccaggtgaggctggtggacagcacagcacagcagcccgtggctgaggcttaggctagggcacaatggactttctggcatctggccaaggtgctgaagggtaacgggggtgaacaaagtggagtaggaagcaacttcatgggcaggagtcaggagtagtagttctagacctggacaggatcataggtacttctgcaaaagagaaaacctgttttcagaattgaatgttcagcctgaggttgctcatggaatcttgggaggagatgaaaatttcagtatcttaaatttttgtgactccaaacaactgatggtgagaatcaggaggtgaagttatttttcctctccttttgcattgggcaagtccatttgctttaaggtaataaaaaatgacatcgagtggtagaaactcaggaattttgatttccctttgtcttcttcagaaatcctctggggcaattgacctttgtgtgtttgagtaaaggttatgaaacttttattacagacctgcttcgagcccccaaggaaggctatgggcctttatcctagaaagaagcccatggacacaaatacacaaaattctgtgtgtgatttcaggattgtatagatctccagtccttggttgagagcctagatgtggactgaattttgtaccccccagcatccatatgttgaagctctaacccccaatatgactgtgtttgaagatagagcctataaggaggtaattacggttaaacaaggtcacaagagtggggctgtaatttctgatagggctggtgtccttataagaggaagggacaccaggcttctctttctgtgccatgtgagaacacaggaagaaggtggccatctgcaagccagaaagagagtcctcacagggacttctcagcctccagagctgtgagaaataaatttctgttatttaagccatccagtctgtggtgttttgttataccagcttgttaagacaggcctctaccctggaagctgccctggcccgtaatgtagctgtgctcatgcttaccgatccatggaggcatcaggatggggaggggaacattctagtgagcaaatgttctggggacatgtatgggagccttggtgcaccgaagtaggtcagccagtagtaccacgcctggctcgctctgcccaggcttcatgagtctgcagtgacagggtgaagtataaaggtcatccagaagaatgatgtgccatcatgctgagtgtgtacctcttctttaggtgttcatttcactgggcaggttgtctaccagaaccaaggggcctctttgaattttctttcaagctattaataagaggcatgcatcctcctagacacaatcatccatttagtaaaataggtaagtatctccccatggctaaaattggagctacctgagccctaaacaactgacaatgtgggaagcatttgctccagacgaatccacttatcccatccctatccttcttgagaaagctgccattgtctgatgtgggtagaatctggggacaacaacagtgagaggtgcggtatgcagactagctggtccaacacctgggagagcaggggcagagtccctagtggtgctgtcagagtgagtctggactgggcagaggagtacttgaaagtcttttctggaagagttaaaaagagaagccaaggtttgagtggctaaaagaaaccagcaaaatctgtgggattcaatgtgacaggagtaaatgaacagtgtcaggacccaagtgttggagccagagaaccaatggtttgtgccaagacccatttagagttcccagctccaccttctcaagcttacctccaccaagtcaccttcacccatctcacagacatccagacctgcttgagatgcccggcacccaacagccagggattagagctttttattgaaatccctgctatcattttagaccaagttcctgaatgaataaaaaaaaaaatcttttgacaaggagagatgatcagattgaaataatctttacaaaattaaaaaaaataggtgccctcaaaatcagaccagtgagaagaaattccatgactggtgatagcatatagctgtttcatttctccgtatcaaaatggccaaagggtggcttcgtgtcagaagacccagatgtttttaaagcaaatgcattagttcaaaatcagcctactgcctcatatactttttatgtcttagagaccccagtatgagtctggattctatagaagctcactatgatggaatattttcctttcttttactaactcactatttacaacttaggcaaatcaccttatcattttggccttggggctctcctttatagaatgaggtagttaaactggcaactaagtaaaaaaatccccttgaaaagtggacatattctgtgtcgcctactagcacaacctctttctctgttggagctacggttttctctgagtagactaaaaacactatcagaagacgtgaatgaccaagatgatgaaaccaggtgcttagagaccaaggctcgcagctgcactgatcagtaaataacgcttccctggtttctggttttcctttttagagtaataaacaacaacaaaagtagagtaccggttcaacttgtgtagtcactaattatacaagtgactcattctaagggctagaaattatcctacaggaaattatcccaaagggtctaccgtgatgaatatctgtgatttccttgagtctgacatggaaaagtaagctgtgactcgtagtcaacaaatccaaaccaacctagagaggaagtgggagagagtgaaactatatactcactatagtgtgtggaatctgaaaatgtttgcctctaagcacgaataggtacatatttttttctcaggtagcccaacgtacattctagtttctctaaatctttacaaagtaaagtattgagggggcattggcacccagtcccatgctctttagaaatcattaatgactattttgctgattttgagaactttttctattaatataaaagaataaaccagaaatctgaggaaactctaaaacttgaaggcaatctagacatttagaggatattacaagtggaaataaatactaatgtcttagactaaccaagcttgacaaatgctgcagaaatctccaaatttactttcttgttcaggcaagaggtgaaatttgtcttgcaatttgaaattacgtttagagtaaacatgtgtcagaaggcttaagtaagcatagtaactgtcttgtcattcttccttgtccactccacaaacagtaacattccaaagatctgcactttgaaagatcctccttagcttttgcatctgtggtgtcagtaggtagcccagtgagtctgaggtagggcttgtaagtgcagatgtctacagcagcaatccctaacacttttggcacaagggacagatttcgtggaagactgtttttccacagacagggcaggggctgggggttgggaagatggtttggggatgaaactgttccacctcagatcatcaggcagtaattcgattttcataaggagcatataacttagattcattgtttgtgtagttcacaatagggtttgtggtcctgtgagaatctaacgccgcagctcatctgacaggagggagagctcaggcagtaatgttccctcacccgcattcacctcctgccgggcagcttggttcctaacaggccatggaccaggccatggcccaggggttggggacccctggtttacaggaccaggaagatattataatgatgtaatgagtgaaatgaattaggaataagaaaaattctggacgaggcatggtgcctcatgcttgtaatcccagcactctgggaggctgaggcagaaggactgcttgagcccaggaatctgagaccagtcagggaaacataatgagacttcatctcttaaaataaaaaaagaacaattctttctccgtttggaacaagtgatagttcactttcctcttaaatctactgaaagagaaaaggcacatagtgggatggtaaatggtaatgtcacttggtctcaacttggggagacagccgaaggtaggagggactttggggaactgggagtcagtcagttgctgctcagctccatccaaatgttgcctcatggggatgcagccctaaaatgagcagaaccaatttttccacaagaatctagaaaactggatttttaaagtaaaggttcagatttgtacatttgcacaattaattcaaaatttttgaaactttgtaagagccaatcctgtatggccctaacaaaaaatatacatctaggggctaaatctgtttataacctgtagttgctgagtgaggtagaacttattagcttgcaccatcttcgatttggagaaaggacaaagattcatggttcattatttgtatgtctttaaataggctttatcagataaagagaaaaaagtttaaaaagcaaggcatttgaggacaagatttatagtgtgtggacaggaactctgctcttgcatttcattcctataacatcagagccagagttcttgggttaatacagaatgcgtgattttattttaggatccacagcacaatgaagtaagatattgctgatgtcaggcttatggcatctatagtcatcttgctgtgaatatggtccttaataaagaattcattagaatgtttcagatagggcctatgttacaacaaagatatggagatctggatatatctagatgacatgaggaattttctagttgtcaaaaaataaatgtttgggctgggcacagtggctcacacctgtaatcccagcactttgggaggctgaggtgggtggatcacttgaggttaggagttcaagaccagcctgggcaacatagtgaaatcctgtctctaccaaaaaatacaaaaattagcaaggtgtggcggcgcatgcctgtagtcccaactactcagaaggctgagatgggagaatcacttgaatccaggaggcagaggttgcagtgagccaagattgcaccacttcactccagcctgggtgacagagtgagaacttatcttaaaaagaaaacaaaacaaaccaacaaaaaaaacaaacccctactcccatcacattgctttagatgcatgaaagcaatacgttttgggtcttgagtatttcttgacatttcaagtgtaaatacagctttagatacttcagcatttttttcctactcattgattaatggtagctttttttctttttctcccaattcaagtacgtagtaataagttaatgtgagatttgtacattttaatttgtatttttctgttttaataatataataaaatattttgtgttgcatttagtagtaaagaagtatctttttacctaaatgcttggtgaatactttcaagttttgtatgattaatagttaaagggtgctaagataaataaatatatacatgctctgtttcctgaactggagattagaaacaaagtttgaaaagaagccagtagacatgagatattgtggtgagataaagattggcaagggtctaaaactgtgaacttgcagacttgtgaaatccccacaaattaccacagaagctgatgaggttctctttttaattttagtcccagcttggtttcagttactatttcaactcttcagcatccttattatgactagtagatctgttagcaaaactgctggtggaaaagtttttgtgtaatatccactcccccaaattgttttagggacattaatcacctgacatgcatttattttcattctacagaagaataaatgcaatgtccagacttggatcccattcaagattcattggtctattactgacatttctaaatgtatctactgaaatctcctgctctttaacctctttgcaggaagatatgtgtctttgtattcccttgagtactttcggtatgtgtttaataaatacttcttaaaaattagattgtaaattgatcaataaagatatcattgaatggtttgggtggtatgcccagagacagctagttttaatctaccaaaataatgaataatacagagtaagaagcatattatagaattttcatttaagaaaatatggactaagtcatagaagaaatgggatttaaactagttctcatttcatgatacagatttctggcctacactgcctttttcccctccctttctccagcccttctttcctttctccagcccttctttcctttctcccttctctctttctttcctttctttgcaaaatgggtatatgtaggtaaaatgtatgtggcttatgaatttgagaggagtgacagaaataggaatcattgcatccctcagtagagggcactttttggtcccttaccaagaaaataataacagcagctaacactcattgagggcatactatgtggcagttaataagcactttacctgttattaacttacttagttctcataacaaccctacaacacagacattattattattctatcatacagttaaagatacagacacacagtaaattaaataacttacccccaaaccacacagttagaaagttcaagagttgaatttgatcccagtggtctggctctagagtccatgctctttaccattacattgtacttagaaaagaactcagtaaagaacgagtaaaatgtgtaaggccagcaaggaaggactgtgttgggttatgtcacatgggctttcacagaagctttcattatgatgttcagaacatgatagtccctctctccccttcaaaatggttttgagtgaaagaatgaacaaatatatactttaatcccaacttgaagacctcaccatcctctgagcattcctgattttccatgcctccctgccttcttcagtgccattttctctgtgtgcagcattctccttcttctctctgcccagtgcatccctgcttgtgcggctaggcacagctcggttctatgagtcaccttgtttttacctctctcacaacactttcgtaatgcccctgatcataacttctgtccatgtgtgccccctctctagatcctcaagcctccgagatcacaatctgtgcctgacatatgcttgtacctccaccatggtgttaatcatagtgtctggcacagaaataagtgtttattcaacagacaagaaagtgactggagaagtattcactgtaattttatcctctttaacaatctgtaatactaaaaattgggaagcatatcttgaaattccactatgagcctgttaatataaaagaaataaatgtattcaataatcaaaagagaaacatcaagacaagaataaggttagactcatccccaaccccctcccatttctgacctctgttcctctcctaagattcaccccatccctggtcctagcccaatcctggacagtgagtccctccctaaggtgaaccacctgtctccctggctttgtccagacacctaatcctcactctatacagtgattgaaaccccagtttttggccaggtgcggtggcttaatctcagcactttgggagaccgaggtgggtggatcgcctgagctcaggagttcgagaccagcctgggcaacatggtgaaacccccatatctaccaaaaatacaaaaattagctgggtgtggtggtgcgcacatgtggtcccagctactcgaaaggtgaggtgggagaattgcctgaacccaggaggtggaggttgcagtgtgccaagatcacgccactgcactccagcctgggcaacggagtgagacccgcatctcaaaacaaaacaaaaccaaaaccagtttttggtatctcaatgcacaatgttaattaagtagcaaaatctcggcatttaaaaaatctgaaatatttacataaatgatttgacccaaatcacttgtaagggtcaactgatttggatcaaatcacctgtgtcttgagctatactcagagaattacatgccccattaaaatatcaaatccaaaaaaaaaaagagaggataagattagagaagaaaattaaagaagaaaccaatttgaagtgtacagaccatgtcaaaagaatatgatggcagagaaaagtagtcatataaagatatcaggcacacttctgggctaggggatagaaaaaatacagttttgttcttaagccattggagagaccgacagaaccattcagtaacataaattttacaaagctaaaggaagtcagtacactgagtgccaaaatccacctggaagggtgaggaaggaagaggagaattctggaaaagggagtaggggattgccaagcgtaagtattgggagaggagagacattcaaaaaaataaagaaacaatgtgtgcaaagcatggggtctgtgaaaccagagttccctttcacagcagtatcacatgtgctggagtaaagagaggaaaaaggagggagggaatgcagggggcaggctttgtatgccatggaaaggactttctatttatgtaagaccacagggaactgtggaagaattttggagacaggagttccgcaatcaatctgataatttggaaagattgatttgggcccaggagagaggggagataaacaggaactgagaaccaatatagaagtctgagaagtgagccattgcggtgggccaggggatacgggatgacagcttgaacccaggagaggcggtggagatgaagggcagtgggcgaggagaagaaacaactgggaagtaggtgatcagacttgggcatgagggatggcaaaagagagtgctaggaaatctagggtgagtcccaagtttctggcatggaatactgggaggcaggttgagccatagaccaaggaaggaaatatgggagatatagcaggttaaaaaaatgagaaggaggtgggtgcggtggcccacgcctgtaatcccagcactttgggaggccgaggcaggcggatcacaaggtcaggagtttgagaccagcctggccaacatggtgaaaccccatctctaataaaaatacaaaaagtagccggacatggtggcgcgcacctgtaatcccagctactcaggtggctgaggcaggagaatcgcttgaacctgggaggcggaggttgcagtgagccaagatcgcaccactgcactccagcctggcaacggagcaagactccgtctcaaaaaaataaataaataaaataaagtgcacagttcaatggtatttagtgtattcacaaggttcttcaacaactagcactatcaaattggacagcaattttatcactccaaaaagaaacggtgaacccactgcagtcaattcccattcctgccttccctcagtgcctggcaaccactaatctcctttctgtcgctatagatttgcctattctacatattttctataaatggagttgcacaatatgtggccttctatgtctggcctctttcacttagtataacattttcaaggtttatctatattgcagcatgtatcagtaccttgttcctttttatcattaaataatattccattgtatggagatatacttcattttgtttatccatttgtcgattgatagacatttgggttgttttcactttggggaaattatgaataatactgctatgaacatttttcaattctcttgggtatgtacctaggaatgaatttgctagatcatatgataactctatgtttaagtttttgaggagctacctaactcatttccaaagtgactgtaccattttacatttccactagcgatggatgagggtgagatacgaaaactcacccaaatgttaagtaaaacttgtccaaagtcacatgctagtaagtagaagagctaggttgcaatcccaagtccacctgtctccaaaccctactcccttcctctgcagtttgcgtgtagcttgtctctgtttggtttggagtcatcaacgtagaggtggtagctgaagccacttctgtggatgagttcagcatggagacatgagaaccgttggcagtttagaggccagcagtaggaaaggagtctgcagatgagacgatgaggtatgaccagaggcagaaaaaccagggaagagatgttgccaggaaaaccaaccaaaaggagaatttaagggagggtgtggtcaagaagtactacactgcggctaagccttagcataagaagacaatgaagagagcttagcgggtgtaatgacttttgccagagtagtttgaatagagtatgagggcaggaagtagaaggggagttagacagagcttgatttgggtggtctgaagagaggatcaaatagaaccagcaaattctacttggctgtgagggatgggagagatggccagtagagggttgctaaattttgtttgtttgttagtgtttggttttggccagaagacacctcacgtttatctatgtagaggaaatacaaggggagttacaagctagaggaaggagaagtggtaagacgcatgaactctagacagttacaccaaggaactggtgaagagagaagaaaggcatggtgctgtttctgtgtgtggaggtgggtgggggttggggggtgtagataccttcacatggtaggtcaagggaaattagttcactctgggcttcccttcatttgtcttaatttgctcacactttagtaaattacaattgattaattcctccttttacaacctaccaacaacatccttattcctattccttggtctcttttaactgtctctttctttttttctttcttttttttttttttgagatggaatttctctctgctgcccttttgcctaggctggagtgcagtggcagaatctcggctcactgctcactacaacctccgcctcccgggttcaagggattctcctgcctcagcctcccaagtagctgagactacaggcacgcaccaccacacccagctaatttttttgtatttttattagagacagcgtttcaccatattgttcaggctgatcccgaactcctgacctcaggtgatgcactcgccttggcctcccaaagtgctgggattacaggtgtgagccaccatgcccagccttcctctaactctttaacctttactttatgaaaagctagcttcttctccctctttctttctcattctctgtctctctagatccactaatgagtccaaaatacacatcagaaaccctagtttctcagagttgtggcatttctgaaagctaatctggcatggtagcaaaccagtctatcaacctctaaaattcttaagaactcccaaagttctcttttagcattttgacagactgtttcccatatgtaaatctgttattaatccatttgtaatattgttctaatggaaaatatatattctaaatttcaaccactttacaaatttagttgggaacatttcacaattttaggacttccttttttctcactgtgatttatgctcttaaaacatttttgaaatgaattttttttgttctgataaggagggcagagtcgtagtatttatctcatgtcagagatgatgaaagtgagcctcagagaagttaaatgggacctaagatactacataaattttctagtcagttatattttctttttttgtaggtatggactgtgatttcatttcaggagtaaggtgaaattagttgatgtcttagatgggaggaagacatatcgttggctcttgagatttgtttttcttttagagaaaagaaggaccatttgctgcaggaaaaacatctgaaacaaaagggaatgacaaagttattaagtggagccttctaattatgggcctcaagctgtgtaactttatttgagagcacagaaataattttaaacacacttttttttttggttcctgtactttaccgttaattgattccaataaaaagtctagctccaaatccctgatttcagaagtaatttcaaactgagacattaccatcccataaaagagtactataaacacatgggtttctaaataggagcaaaatgttttcacttagatgataacatagtacagtttctcttagaaaagagaaattcatattacatcttcagtatctatatatacaaagttagcgtctaaatggtaaaggaaatctatttattaaagcttatcactgtcaatagtgaaactggataataaaattaataataaaaataaagcagcattgtgcaacccctatgctttttgcaatcctttcatttatttgtgcctttaaaaaaatccaaaggtggttcagaactcaatatatccctacctgaccccaatcattttctctgtcatcagcttttaatctaaatattgttgtctcatgtgtattcctattcatttttcacgtagtgataaatttctggattgcaaattgcatatgtctatcctatgcctaattctggaatcatgttcagatatttccaaccaccttactgtctgacactattggacttagcctgtattttctattgtaattttgtgacccataaagcttagtatctttcctgtcaagaaggcctcctagatctccttgggtggaatttggtcccatttctgtgctcccgcaatgccctgggcatctgtctctgtcaccagacttaatggactcattggtttataataactgatttatattatgtctcccgcatgggattgtatgctgttgagaatgggctctctacacctccagcctattgctataaacattgtgcttaatgctaaatagacaataaacattggcttttgtgcccagccaaactaatgcctttctctgaaaacctggaggtccatttaaagacagtctttcattatgttagtgcttcttgctgcattcctgtggagcaacttaaaattcttgttttcaaatcctttcccttgtttttagcgacagtcagcttccactcccagcctagagtgatggtagtttaggagagattttgtagtccaggctgtgccttctgttcacattctcttgctttttagaggctttccatgcaatgtcttcattcccttggagcctcttttgtgtagattctgtccttggagattgtcatctggatgcagtgggaagacccctaagaattttacttatgcagttgttaaaaatgccttcctgttcctagtgagcacatgaggctgagcacgttggtattggcaccaagtactaaacagaagtcaataaccagctcagagctcatctcacaagacctcattgcattttttggtgagaattaagtaaaaagcaagatttagccacattttagttattgctggattgtttgggaggagcctggcctcccagagtttgttggggaaaaatatcaacactgtgaccaacatgaagagcacctaaatgattcctcctcttcctcctcctccatatcatcaccatcatcatcatcatcatcaccaccaccaccaccaccaccaccattattatcagcatcaaatccactcagaattaagtggaacaacaaaggagtaagggaatgtgactttatttcagggaatttgagaccaggtacttccagagcattaggaccgcagacaggattttttttttttttttctttgagatggagttttgctcttgttacccaggctggagtgcaatggcgcgatcttggctcaccacaacctctgcctcccgggctcaagtgattctcctgcctcagcctcctgagtagctgggattactggcatgagccaccactcccggctaattttgtatttttagtagagacggggtttctccatgttggtcaggctggtctcgaactcctgacctcaggtgatccgcccacagcctcttaaagtgctgggattacaggcgtgagccaccatgccagcaggattcttcggaatacaatattggtatttttgagagaagaaaatattgatctttaaaaaaatgattttcccgaagtttaaaattttaacttctgaggctcaagtttcctagttctgggtcttaactttgaggcattatttggaaagtgaacactcgagttgccatagtaggtcataatccttcaatgtggctgaatgtgtccatctggaagccatccaactgcaggtgtctagcatgtatatatatcatttccctgctatgttcggctgcagccaaatgctaggagaatacccccttggtgggactttggaatttcatggtatttattactaaagcttctctaagattctcatttcttgttcaacttatgtcaggtagctgtaaatatgttggtttggttgccaatattcaataccagtaaccaagaaaacataaataaaatgcagttaagctttgttacttgttagcagaaaatgcaacaaggccttgtgagatgagctctgagctggttattgacttctgttcagtacttggtaccagtgattccctgagttgccaagcttgctgtaatagtgaacgttattcattttcagacaatagggccagtgatagaatgcttaccagccaaacacagagaataacaaacctttgttctggacaatgtctagaaactgatctaatgggcaggccttaacaacagctaaaatttttgtgggtagtagaaaaacataaatttttggagttggacttggctttgcaacttaactagtaacatgatactggacaagtaatttaacttctttaggcctcaatttccttatccatgaaatggagataataagaccttagctttcggggtgttaaaagattgaaagataacataggcaattttcccaacattatatctgtcacattacgttgcgaccaacaaatggtatttttagatgctgttattacttcattttctaaaatccaggacaatgttgattattaattccccattaacttagtgaaatctcttttcaggataaaacagacaacaaaaatttttaaatctaggaaaatcctattatcacattaaataaacacatccaatgcaagaaggacaaaaaatttcttttagagttgaaaattacagtattaagtgtggctccttcctactgtcattgttaaataacctttggagatactgcctcaccatccataaatatgggggattttagtcttcgtgtcatcagttgtggtccatttacaatgaatgaactttgccataagcaccaggcccatttcttatattcatactatcccagtaggtttgtgatagaaacaagtttgacagtgatgacagtatgactttggtggagcacactgggaagaacacctgattgaagaaaataaaatagaaagaaaaattcaaagaacagaatagtgaacttaaaaggaatgagaaggaaaatttaaacagaaacaagaccaatgcagaaataaacaaataatttcaaatatagtcaactgaggccaggcacagtggctcacacatgtaattccagcactttgggaggccaaggtgggcagatcacttgagatcaggaattcagaccatcctggccaacatggtgaaaccccatctctactaaaaatacaaaaattagctgggcatgatggtgcgtgcctgtaatcccaggtactcggaaggctgaggtaggagaattgcttgaaagtggggggcagaggttgaagtgagccaagatcacaccactgcactccagcctgggtgacagagcaagactcggttaatgagagcactggagagtgtgagtggtggggcagagatgcagaaagcctagtggggaaggtggggatcataggaaaggtggctctggtggtagttaccagaatgtaatattttggatcaagtcaaaggatgggagagaaatgattttcttgagactgagtctctctatgttgcccaggcaggagtgcagtagcaggatctcgactccctgcaacctccacctcccaggttcaggcgattctcctgcctcagcctcccaagcagctgggattacaggcatgtgccaccacgcctggctacttcttgtatttttattagagatggggtttcaccatgttggccaggctggtctcgaactcctgacctcaagtgatccacccgccacagcctcccaaagtgctgggattacaggcgtgagccaccgtgcctggcccatatctggatttttaaaagattctttcagctgcagaatggagaatagattgtagtaaagacctatactgtggatggggaaaccagttagtaattggttaaaatcattcaggcaagagatgatggttgtctaaaccagcatgtgtccatggagaagggaaagaagtggttggtggcagaatttcttttgaaaatagattcagaaagatttactgatccattgtctatggggaatgatcagaatcaaggataattcccagatttctagctagatatttggttggctgatggtgccattcccctgcgattgagaaattgagagtggaggggaggagaaacaagtttgtgggaggaaaatgatgagttcactttggcagtattgatttagagatgcctgagattccaaggagaaattttgttttaaatgatttcccttgatcatatcaaggggaaattttgagttaacttctagatatccattacggacttctgagttaagacctgggcatctttaagtgctaagaattagcaggaaaaaaaatattggaggaagaggcagaagagtgagaagttaattcacgtaacgtggtccctgggaggacaagagtaagggatccatgcacaggtggagggattgaccttggataaagaagagggccacttctttcaatgcaatagcaggagagaccccccaaaaagggcatccatgtgggtaaatttctcatttttatggaaggaaatcaaggaagtttctgtctggcaacttccatttactctaaaaaggagacacggtcatctgccagaaggtatgatggataccattctgacgtttatcgagaggagaaaatgtacaaaagccattgtgaaaagagaagaaaggaaccagaattatcaggattatttctgtcaagagtagaaggctgatgtttttcttctcctggaggtatttgtttgttttttattgttgttgtttttgagaggaagtttagtgttccttgctttttgggctattgtatcatctacccatgtcatgtttctaaaattacttcagataacttctggaacaatgtttgtggcaaatctcccctgcattcaagaagcaattatgagtttctattgttatggtctagttacactttccataagtctgagcctcagaactaaagcaaggctggcatttgttaggtggtgtcctcacaagggcacagatcctagctcccatttcacctaggtttgcttgatatggtgaagaggacgttaagataccattggaaatgaaataataagaaaatcaggcagggtgtggtggctcatgcgtgtaatcccagcacttggggaggctgaggtgggtggatcacttgacgtcaggagttcgagaccagcctggccgacatggggaaatgtccgtttctactaaaaatacaaaaattagccaggtgtggtggcacatgcttgtaatcacagctacttgggaggctgaggtgggagaatcacttgagcctgggaggcggaggttgcagtgagctgagatcatgccactgcactccagcctgggcaacagagcaagaccatctcaaaaaaaaaaaatccagatatgatcatgccattctcctttcaaacaatggcttcccgttgccctttggataaaggatatactccttactaaagcttacaatactgtcatgagctacttccactgacgttttagtctcatctcttgccataacactttagtcattgtaaatgtcttttcgatttctcataattgaaaagacttcatcttcattactaagctaaaactcctcaggcttctagactaaattagtgcccctccctacctgctctgtgctccataagatattttattgtcattgttcctttaattctttgctagactatagaggcaaggattgtatctgtcttgcttatccatttatccttcacttccccgacaccaaccccttctaccagccactctagtattctgttcggtgtctggtgtctagtagatcctcagtaagtatttatcaaataaattaattgtctttcagagtttttattatttcatttactaacctcaatcttaattctcctatggagtatcaggtaatataatcacagcactttaaaaaaaaatctcatgtctgtggtgataaagagaaattaagtttgcatatttccagaacaatgaatgctgacatctttggcattaatctttaagacttcaaggtttgtaacaattaacacttgtattcatgaaggattagtcatttagagaaacctctttgtctccatatggaggtcatatgaatgtaaagatatttatgtagtcatttatgcataaagataataactgccattggcagggaaggatcttcaagaaattcttttatcttggaatagagacaatgtgatagacaagacaattgttgaaagttctaatatggccaacatcatttcaaaacgatttgttgaatacttactagttacaatatttcaccttataaatcctacaattctagagccaagagaaagcttccctgtcattttggcatacttcctagataccgtctgggaatttagtctacaacatctctgacagtcatgacctaactttggcttgagaacctttgagaattggagtcccttgctggtgaggctgcttggccccctaataggtgctccagtgtcatcgtattttttcttcgaatatcttttctcttctctaaatgaacacctctctccctttcgcttctacaaattggtcctctacttcaggcctcaacttaaaagacttttaatatgggaggggaagaagtagtgcaggtaaaaggagaccctttccctgagcactcagcgttctgcaggctccgtgatggattcactttatgtgacctcactaactccttaaacagtctagtaaagtacgcagcattatggaattttactcagagataagtcagactttccccattcagttacctaatgttgaaacccgattttttttaatggagaggttctgagtcaagagcctggtatgctcatttatatctgttaatgaacagttacatggaattggctaccttttattatttctaaaattgggagcactgttcttagtgtcctaggcaacctcagaaggatgttttttgacaatagaggcttcacaagtcatgttaatgaacgtccttttgctacaagaacatattgtagcctttgaaatcacacccaacaaaactctattgccctttaaaaataacacttttcttttagaaataattcaaaccctgggagaaatttggcttattgtgtccctttcagacttgggagaaaatgtatatgctggagaacaataattttcatggccgccagagagtacctatcaacaccacagcaagtcctaaacaaacagcaagttcttaaggccccattgggagactaaacaacctgctctaaaataacattgacattcatgttgagacaatcagtagtgatttagggtcagagtttagtgatcatgaccacagactgttttaaggatttactaacatttcaaagtcaatgtttggaaattcttaatgagtaatccactgatatatttgcatgaaacagtagtttatactatgtgtatagaacttggttttgttgcatatgtgggtttttaataggctgcaaaaagcttacttgatttaaaaaaaaattgtcttaccaaataactattttgaatatttgcccttgttaattgatgttgtgggtgaagtttagacaaaatctcaaataccacctataactcaaagtttttgaaaatgctttaacacaatgtggattctttggggttatcatgatctaattctatatgggggtttctttctgttcttttgtcaggttctccaaaatacttatcattcaggttgaataaaccagttctacagactgcttcttccatgcatttcccaatgatgctagctgcccttaaaattctttcagatttggaactgtatctgtatggaaacaacaggtaagtatttctttaaattgtcataaattatgtaagaattctaataaaaattaaatatgcctagagaaactaaaagaaacgtgctatgatgttaataggagttatctttgtatgatgagattagggataactttttccttaatgtcctgttttaaataataagtgtatattgcttttgtgataaagaagccttattctgaaaaaggtagttgtagacacaataatgtccacacataggaaatgagatctcaggtaaatgtgcaggtgacagaaggtggagcagagactcagacacatctactgattgcagaaacagattgtaacctgatagcccggcccacctggcccgtcgtgtgccagtttctttgcagatcagaaatataaccctaaacgtggtgatgagtctttggttccaggttatctctaaccccttatggggatgtgaacaccttccccagacagctcagctgagtaattttggttttgaattgagaaaccagtttagtctaggcctatttgttctaagtaatatgtctactcttccgtgagtaacaggctaaaaaaaaatgtctgtatacacatgaaggtaatcaaacttgttaattgttcaatcttgacttttaagggtactgatagagtttacattagaggaatcagagaagttctgccccagaatgtcttggaaaaggcaagttctaatgatgaatataggcagattctattaagtttagaaaactggcagaaatttttgtcccagtgatgtttacttaaagctgatttagtaaacaaacttcaaaaagtctcttaaaaatgtatggtatctatacacactcacataaatatactcatattcaatgacaaacctctgacaagtttcatgatattcatttcctcacccattaatccactcgtttattaatttagtgaataatttttgagtatcttttatgtgagaagcaaaaccttaggtgttaaggtgtataccagagaacaaacacaaaaatccctacaatcttggagcttatgtttatgacactatagagatttaaaaacaaataaacaagtaaaatatatagtttgtcagatggtgttaagtgtaatgaagaaaaataaatccaggaaaggcagtaggacatgccaagtgagaggtgggtgagagctgagaggtgcgttgttttaaataggtcaggaaaggccttacagataaggtaactttgttaaaagatataaaaaagttagttccagatgactttaataatctgctttcacaaatcatttcagcagcagaattgggaaagcgtttgatccagcgtttctgctgtttttattgaacacttgaaataaccctttattttatgttctaagagtggtaccttcagcacaagaatctggttctttcacagaattaatagagggcaaacattttttccccagagttatgtgcctggtgaacagactcattccaatgtcactccagtggtctcactgaactaatacaaccatacatatggacattaggtattttttcctattcattcacatgtttgttttctgaagttgactatgagcctgttgaaggtaagaatgggacaatgatttgttcatcttggcagcctcaatgcctaaccaagttcctggcataggtcaggtgctcaatgattgccagttgaataaataaagttcaagagtaaaatagacattgactttaaacagctcacgagatgaatcctcaatggctgcatttacctactaaaatgtctaaagtggataaatgtcttacaacatgacagcctccctcctgctccaagtcctatggggacctggcatcaaggacctgctctgtaaaataaagtgataatgtctatccagcagcgatgcttttgagtataagcaactataagaggctattgccaatcacgttttccccatgacagtgctggcaagtgggatagctctcatcctcacattttccttctgtctctgtaacagataatctgtcttacatcttctttctgagatgatgtggaggagtgataccctttacactagattagcaggcaaaactatgatggtttgtgatatccatgcttgtagaagtaataagaagaaagggaacacagaagctttattttatagtggagtcctgactctaggccttaataattgcatggttttgggtaagttgctaaatcactgtgaatcccatcacctcatctgtaaactgggaataataattactaccttacagcattgttgtgaaggtcaagttcaataatatatgcaaagcattcggaatggtgcatagtacataatgtgggtgttcaataaattaacagtagtatttttaccactgcagagaataatcttactctcaggcaagtagaatctgttacagttgttgaatatttatgtaatcattgaggatgtttataaatatatttgcttctaaaaattttttccttacatattcttttattaatattaaaccaagtaacatttataatattcttgaatatcttatcacttaagaacatgaggaaaggtggccgggcacagtggctcacacctgtagtcctagcactttgaaaggctgaggtaggtagattgcttgaactcaggagtttgagaccagcctgggcaacatggtaaaaccccatctctacaaaaaaaaaaaaaaaaaaaaaacccaaaaaatagccaggagtggtggtgtgtgtctgtagtcccagctacttgggggtcagaagtgggagaattgcttgaacccgggaggtcgaggctgctgtgagccgagatcgcactactgcactcctgtactccagcctgggtgacaaagtgagactctgtctcaaaaacaagaacaaaaacaatcaaaaaaaaggatataaggaaagtataaaacattgcattaaaaaatttcagcagtgaagtgggatggtatataacagggaacatttccatggtctccaagcagcatccatccccgagaacagcttagcaggtattttggcatcataaaaggttgatgtaatctcagtcactatgatacttttcttgtacaaagatacagtctatggaagtcattatcttttcaggtaggaaagtgatgctctagtggggtctgaactctagtctaataactttctctcttttttctttttttttagagttttcttgaagtacaactaaggacaggtcaccactaggcactaacatcgctgacttgcatgattatggagatggtctatctgatgctgaaaatgtctctagttttttgacaacggctaaataaccatgggatcaagtggccttgggaaagcagcaacattagatgaactgctgtgcacttgcattgagatgtttggtacgagccttttctcctttcatctcttttggatctctcgatgctctcactttcctctattcagaggcaagttgcttgtagaacagagttcagtctctgtaccttggtatttaaggcctttcggatggacccgggtctgtctctccagtttcactgccctccatatttctttccctttactgcccacagctcataccccagtcaaactgtctacttaatgtttctggaacattctctgcacctttctaccaccatccattggtcatattcccttcactgaaattctgcttcagggccctctcagatgttcatagtaccattcctagtcttcttggtcaggaatgctgcttgcctcttcccccatcccatatcccattgtaattccttatagcacatggcatatgcctctgtaattgtttcttggtcttttgactcagtcttttgactcagacgaatgtgagtagcacaattgactacattctacattcatacacgtcatatctgctactagattatacacttttcagctgtatgctccttgtgttgttgttttcatatccacctcagcattttgggttatccgttgcacaaagaaagtcaacccacatgggagtagttatttattaaattgattactatagaaaccagagttaaaccagtgcagggttgccagataaaatacaggatgaccagttacatttgaatttctgacaatcatttttagtgttagtatgacctaaataatgcctgggacatacttacaatacagaaatttatcattgtttctcttaaattcaaatttaactgattgtcctgaattttactaaaactgtcaactgtagaccagaggaagggtaagacccacccacctttacttgcaaggaaatactagccgaagtaggaggtaaaagatcactggtcggccaggcgcagtggctcacgcctgtaatcccagcactttgggaggctgaggtgggcggatcatgaggtcaggagttcaagaccagcctgaccaatatggtgaaaccccgtctctactaaaaatagaaaaatttgccaggcgtggtggcaggcgcctgtagtcccagctactcaggaggctgaagcaggaaaatgtttgaacccgggaggtggaggttgcagtgagccgagatcatgccagtgcactccagcctgggtgacagagcaagactccatcttaaaaagaaataaaataaaagatcatttgtctatgaaaagtttttgacatatgacactactgcgtctctactgatgttagaaaaagtaaagaatagcactattatctcctcacttcttgttttatttttctaacagatgacaatggagagctggataatagttatttgccaagaatagttctactgatgcaccgatggtatttatcttccactgaattggcagaaaaacttctctgcatatatcttttcaactactgtgtaatttttacaatcataaatcaagctctgtatttagatagagtgtctatccaaagccagtaaattaagatgaataaatagtctttggttatccagctgttttgtgaatatatatagatgtctagacaaaacacatctggatgatagaccagatagttgactctccatctggatgttttggctgtacttgaaaataatcactaagatgtaaaatgaagcaggaactgtaggctggatgtttctaacttgtcttaaacatttctgttattagaacaatgagagaatatttaacaatgattcaagaccaaatttgtttcttctgggatggcaaaatggtgggcatagaggacgcagcttaatcatatggaaatacagccaaaataatatgctcttacttgggcacaaacatcaatttagttttcacatctccccttgctgccaagacacaatgaacattctagcagacttattataatttgttgactgatactaattttagattttcttctgaaatgaaaacaaaaaaatcccacatggttagaaacaccattccgtaatgaaggcttttagcagtctaccagttctctacataatgcagtccagaaaagtggttgaaagccaaatgactgaaaatgcagtctcccatttgtaaaaggttctattccctgagagccaatgcttttattatacaatctctaatgtcagtgcctgcagtctctgccttcttcaagcccatgaggccctggagatgagtgagaacccctacagggagggggagccttagagagagaggcacagccttagagggagaggcaccatcaagtgttattagggcctgccaaggcttctggagccagtagggtgtccacctgttcagttcaagcttcctccactttctacttcttctcttcatcctcctcacaacctcagagcagaaaaggatattagacagtctataaggtctgtggaagtgagcaagatcctagctcccagtggtccaagggtcatatgactccactgttgaggtgtagaaaataggtaaggatggagggcattgactcagtctggccatattcctgacaacctagacattgtccaaagaatgtacccaccaacagcattctcacccttagcatggccaccaatgcatgaaacacaaataaaaagggatatttaggcatagtaacgtttaatgtggaaagttgaagactgcctgtgaatcgacatttctataaactttcctccctttggattccttgctcatgctatatccacagtgcctggcatatacacaagctcaataaatatttgttaaaaagaatatgaataaatacgcttacaagtaaataacacaacttgagtattaatatacctgaaaatgacattttcaaatattaaagaagaaattagagtacccatacagttacacataacataacgacggggatacattctaagaaattcatcattcgatgatttcatgattgtgcaaacatcatagagtgcactcacacaagcctagatgctgtagcctactacacacctaggctatatgatacagcctattggtcctggactacaaacctgtacagcatgtcgctgtactgaattctataggcaactgtaacacaatggtgggtatttgtgtatctaaacatagaaaaggtgcagtaaaaatatggtataaaagataaaaagtggtacacctgtatagggtgcttatcatgaatggagcttgcaagactggaagccgctcagggtgagtcagtgagtgagtggagagtgaatgtgaaggcctaggacattagtgtacaatattgtagactttatagacactatacacttaggctacaccaaattataaaaatatttttctttcctcaataataaattaaccttagcttactgtaacttttatactttataaacctttaaaaactttttagtccttttgtaatatacaccttaaaacacaaatatattgcactgctgtaaaaaatattttctttcttaatatctttattctacaaacttactctatttaaatttttttttttactttttaaacttttttcgttaaaagcaaagacagaaacacacgcattagcctaggtttaggtttacacaggctcaggatcatcaatatcactgtcttccacctctatctcttgttcccctggaaggtgtctgcaagagcagtaacaggcatggagctggtcatctcctatgataacaatcccttcttctggaataggtcctgaagaacctgctgaggctgttttacagttaactttttaattttttaagtaaaaggagtactctaaaattacaacaaaaataatatagtaaatacataaaccaataacagtcatttattctcaagtatcatatactatacataactgtgcacactagacttttatatgactcacacaacagcaggtttgtttacaccaccatcactacaaacacatgagtaatgcattgggttacaacattatgctggctaccatgtcaccaggcaataggaatttttcaatcccactataatcttattggaccactgtcacatatgcagtccttcattgactgaaacgttgttatgtggtgcataactgtataaggcattaatcctaaatacaaaatctttttggttaaaatagtgtttctcggccaggcgcggtggctcacacctgtaatcccagcactttgggaggccgaggtgggcggatcacaaggtcaggagatcaagaccatcctggctaacacggcgaaaccccgtctctactaaaaatacaaaaaattagccaggcatgttggcgggttcccactactagggaggctgaggcaggagagtggtgtgaacccgggaggcagagcttgcagtgaaccgagatcgtgccactgcactccagcctgggcaacagagcgagactccatctcaaaacaatgtagtgtttctctgtactaccaactttaattatgtatagttgccagactatttgtaattacagttggcagttattggttaataagtgtggaggaaggcaaaactaatcctgtaagtggcttcttcttcagaccaaaaaaatgcattccagagctataataaatcaagtttcaattgttcagtgtggaagtcatcagaggccacttctctccgtatttgagtgtctatataaccccagcatggtcctcttattaggaattggtatacattgagggcacagctgcaggggtgtgcaaaggaaaggaggtgcaaggattttttttctttaactggtttacgtatcgaaatgccactggagaaagctgcaatgaatttcgattaaagatctgctacttcatgaggtaaatatatttacaaatttaatttcttgtagtttctggttctggaatcgtggacaatttccttttccccaagctgcagacctagtttgacaacagactctactctgatacccctcccaccaactttgttaaaattggctctcctctgttgggtggggtggggggaactatcttttggactagagatcaagtagtagtaaatgtgattacggaatgaaactagctcttagaaagggtggatttattttcttctattccctcaccacacccattcccatctactcaccatgaattgaaggaagggtttcctctcaactgaaagagaggctatgagtgggagcggttttagattgaaggagggcagagagaggctccatgtgatggatggggttttggagacaggagatggctaatttgaagtgtggtcctggatggtcctggacttggtgttaaatgtagtctgtaaaacggtacaatcgtttccatagataaccaacttgcaatcttccagctgccaaaaatatttgatgcctttcaggtactggattctgaagtttcctgcagagtttaatttggatcttggtttgattcgtatgactgaggaatttcgggaagtagctagtcaactaggatatgaaaaacacgtcagcctcatcgacatatccagcatgtaagagtggcaccgacgtctttcacacccaataagtccaccacttaggggaggaagtagtgatcaccccacttgttctgagtccatcccactcctgaatccaggtttgcttctgtgaggaaagccttgctgcagtgagcgcaagccgtatgggacacagctcatctctccaagcttcagttttttttatttgtaaaatgtggacgatacctttctcatgagattattatgaacattcaataaggacacaagatagcacatgaaaggatttggcatgcaatagatgctcagtgttagttactgagtctgaatctacttaatgtctcttacaccttcactgattaaagtgtggtctgcagaccagcagcattggcgttacctgggagctcattaggaatgcagcctctaggccccaccttaaacctgaattggaatctgcactttaaagatccccaagtgattcacatgcaagcttgagaagctctgtaccatggtgctgctgaggttggcctcagaacaacagccttatggtggttgaccatagatgtgccaggagctggttagctcagttattaggtaaccggtgcaattaggccactttcatatcaactaggtaactttgcacagggaagactatttgatgatcctaaatatggctatccatcttgcaaatgtctgttcttgtgtgttacgtattcatagtctactctgttttccactgtcgattactattgaatacttcttcaatagtaatcaatagtgaatgatccaggaattataagggatgtttggtgaaaatacatattattcaggatcattcctaataagtcagaacctctggcagcgaggcccaggcctctgtctttataacaagcttttcagatagttcatgttatactaaagtatgagaaccacagcttctagtggtttccatgtgtcttaaatcaccacctatatcctgataaactcccaaatttatatactagccccgacctttcctgtatgatccagaccttgccggtcacaaagacactaagtaagaaattctggatggttcagtgcaaaacctaccctgtctggaaaaacaactgcaagtttatgttctgttggcaactggtcagtggttttctcttccaatatgaaagacagggcatgtattttgcacaagtccctggaagcaagccaagagttgcagagtcagtaggttaataacttccattgagtgaaatgggctttcaacacattgaccggactcactcttcttttatagtccttcctatgactggatgagaagagtcacacagaggaaaaaagtatccaagaagggaaaagcctgtctgctgtttgaccatctggagcccattgaattggctgagcacctcacttttctggagcataaatcttttagaaggatctcagtaagaaacttgacatttattcttccaaggataacaaccaccatgccaactttcccaagagctgcattttcatactctgaagtgttggcagcttctatcactgtgctctgctggagaagtgcccttaattcacaggaacaatcccttttaaccaaagataaatattatcctgtctttattttatggctcaggagctatatttctgtcgctattttcaatgtctcctttcataggattaaagcgtgatttttctaaacagtcagtggagatttaaccattcaaggttgatttagctccattgacttctcccaagtgaacatgttttgctaggcccttcgtttttgggaaaaaatatttagttaggttcggatttgtataaatggctaattatgggtataggttgaaaataggaattgtagactttaaggagaatctcaacatcaggttgtttctttcccagagatagagatcctgaattaaacttttctttcctactcatcttgatggagcctcattccttctctaactcccccttttctttctctggtctgtgatttcttagcctcctgctctctctcctcccgttatggtaaacattttccacactggttcacaatcagccagccactttgctttgtctcgccaagctgtggggaagtcgctcctcctccttttccaaggtgtcagagaatgaattacattattgcgtgcaaagaagactgtcttggttagaagcatgaatttctgaaagactgattctttcactaagtaatcctacttggagaggaccttaacaattccccacaggcaggccatgggagtcccctgcacagtttatatgatagaaagctcttatgtattttttgacatccatgctaacattctgaaaatgtgtttgccttgctaaagagcagccttacttcaattaattttttttcttctgtcttctttttcttgaaacaactttacaactgatgctaacttgaaataattatatttacgttcatttcctcgtctttattgtataccgttatatctttaacttgcctgattggaatcaccagcagtgtgttaaaaatggagattcttggccgggcgcgcctttaatcccagcactttgggaggccaaggtgggcagatcatgaggtcaagagatcgagaccttcctggccaacgtggtgaaaccccatctctactaaaaatactaaaaaatttagccaggtgtggcagcttgcacctgtagtcccagctactcaggaggctgaggcaggagaattgcttgaacctgggaggcggagattgcagtgagccgagatcgcgccactgcactccagcctggcaatagagcgacagtcggttaaaaaaaaaaaaaaaaggagattcttaggtttttcttctgaagatagtgatcatttacacctagagtgttcccaggaaccagcattttaccaagtgccacaggtgaatcttatcacctagtaaattttgaactcattggaatacaactttgaatcttgcctctttctcctcccaccaaagctgtgatgtgtagtagtgggtgtctttgcgtggggtgagtagtggggtttgaaaagcagcaaaataacattttaaagacacatgtatattcaaacttttaggatgccattgtaaatgtgaaataaaagaaattgtgttgttacgaaacaatatctcaccttttctatgcaatattctaatttttgattttacaaaggctctattataattcagagtctctgaatcttcctttcctagttcactgattaccaaagctatgtcatccatggctgcctggagaataatccaaccttggaaagatcgattgctttatttaatggaatctctaagtgggtccagttgatggttcttagcaaaccaaccccccagcaaagggcagaagtcatcacaaagtttatcaatgttgcaaaggtatgtctggtaatcagactgggttcttgagttctagatgttcgttcactctgttgagaaaagtcattgaggaaatgtggcgttcacagtataagggcatcggacaactaaactactcgctgatatctaatgaacaaatcgtatttttgtcatgcaagaagattgctttcagaaagcaatgcttagaagcatttaatgtagctatttctctgtgaaataatagatatatttctctgattctatttgtgcttcattttaaattgatgtaatgttttccttagcttcttgttattaaaattgtgcataaatttacttgtaattcagaaagtttagaataatttgaaaatccttaaaaagcattgatgcatttttattgcagaagctccttcagctcaaaaattttaacaccctgatggcagtggtgggaggcctcagtcatagttccatttcacgcctcaaagagacccattctcatctttcttcagaagttacaaaggtatagtagacttgatcctaatcaaaagtaaaaaaatgcatttgtaaattgttcaggtttagtatacgcctaacaaatgtcactcagagtgggaaagttttcctcttaaaccagtggtaggttataaatggggacaaagtagaaagggaataaccacaccagctgagtccacctggaaaaacaggttggaggtggtggtaagtgtcctaggaagaatgctttgacataccattagaatactgtagtggtggccgggcacggtggctcacacctgtaatcccagtactttgggaggctgaggcgggcggatcacaaggtcaggagatctataccatcctggctaacgtggtgaaaccccgtctctactaaaaatacaaaaaaaattagccgggtgtggtggcaggcacctgtagtcccagttactggggaggctgaggcaggagaatggcatgaacctgggaggcagagcttgcagtgagccgagatcaccccactgcactccaacctgggcgatagagcgagactccatctcaaaaaaaaaaaaaccaaaaaaaaaaaaaaaaactcaacatattgtagtggtaaatattcaacaggtatctatttggtcctactatgtgataggcattgtgatacacaaggtaaataagacagaaatagttcctaccctacctcctgaaataaagtcattgaatgactattcataacactgtgttgggcacatcagaagatagaaaggggaagacataggccttgtatagaaatcctcagatttataactgaattgtcatgaatatatatatatatattagaaacagtgatcattttccaaactgagcgtttctgccacatttattttcatgacatgatagttgtttttcttcttgagcaaaaaggagcatttcatccttatgaaaagattctcatataagagtgcactttgctacttcaataaggacacttttagctgtgagtttaaaagaaaaagaaaaaaacttctacagcaattaaacaataagcaaatgtatcgtccatcaggcgtggtggctcacacctgtaatctcagcactttgggaggtggaggtgggaggattgcttgaagccaggagttcgacaccagcctgggtaacatagctagatcctgtctctacaaaaaaaaaaaaaaaaaaaaaaaaaaaactagccaggtgtggcagtgtgtgcctgtagtcccagctatttgggaggctgaggtggaatgatcacttgagcccaggagtttgaggctgcagtgagccaggatcataccactgcactccagcctgggggacatacctggaagtccagagacagagcaggcacggtctgatcagacctctgactcaggtgctccgcccgcctctgaatatcggagagttttgtttttttgtttgtttcatcaaactgtttctctcctaattgggctgtatgtagcaaccgaaaaattacgttcccttgttcatgaaagttgaagatagggaagactactcacttcaactcttcacccatagaattaaagaccttttgagccaactcaggtcttaggtccatccctggaccaataacagttgccagagtaatacaatgtactgattggcttaaccctgagttcctgaactaatcacaaactagaaggatgcaattactctgatgataaatcaaaacccattcctggttctggaaatggaaacagactctgtctgagtcacaagggctgctttggagagagcagactaatcaaaattggggtctactagaaaggtctggttgctgtgaagcaaccaacgataacttgtccatataaacaacaggaagtaagccacagaagtaccgttgtttgacctcaagctctgtactcattccaagtgtaatggaacttattaggtaataagtgtttcattttcttttagctttgtaccagatctcaagtaaaaagcaaaaacaaattttaaatgttgtgaagaataagaatctgatagaagtttatagaggcttggagaactaccagtgcatcttttaaaattatgtatcggaacttctcttacttacagagaaagaaactgaggcccaaaaaagtgaagtgacttgctcaaggtcacccttctagttaggcagaatatagaaccacagctatctcacaccgcattgcaactttctctaccccatactgtcccaaattaacctcgagtaatatctggaatgcaactttcttggaacaaataacaattttaatattcgacatgcttgaatttgcggacagtaatattttcataaatttccaaacacttaagtatacatgatgccatttaatatcccaacatccctagtaggtaggcagacatgtaggctatttccattttatagcaaaatggaacaggctgctcaatgcatagccaggcctagtactttttctaactttctttttcctgattcatatttccctgcagcaacattggtgcaagtgatacttttctcagtagctgaggaatttcctagccacacattgcagggcccgggggtgtgcaggagggaaagttgtttgaaaattctacttttccatctgttcccagaactggaatgaaatgacagagttggtctcctccaacggcaattactgcaattaccgcaaggcctttgccgactgcgatggcttcaaaatccccatccttggagtacacttgaaagacttgatagctgtccatgtcattttcccagactggacagaggagaacaaagtgaacattgtgaaaatgcaccagctctccgttaccctgagtgaactagtctccctgcagaatgcctctcaccacttagaacccaacatggatttgatcaacctgctcacggtgagttccaaggagccaagtttgggctcaataattcttctgcacctttctttccaggagacacaggaagatgtgtgccagcaattcattctgggggaaaattggtttcagagtcaatagatgagaggaaatctcatagaacaagggaaaaggagccctgattaatattttccataaccagcaaatcttggggcaaagaaatctacctttgttcggaggggcccagtctctgccatatgactccacttctggagttcttaggctcctccagactgtgcctcagccctcactctccttcaccacattcatccaacttatcacatccttctgtatgtcctccagtcatctgctcctctttatcctcactgcactgctttggctgaagcctggagtaatgcaaggaccttatctgtgatccccctgttcccattatgaacctcccaaacctccaggatgtagtttacagtctggcattcgaggttcttgaagactcagtctccaaccttctttgccatcaccctatcccacattttaccagcctttgagaaatattgaacttcttatactttccaccccatgaaatgctgtcttctgcttcctggcctttggacttgcttggagaatcccatcccaacccatccatgtggcaagttcaatttcaaaagcctgtctttctggagcattctctctccccctccatagcagtcatgcatctgtcacatcaccctggcactttatattttccttaactataggaggtatcactctttattcgatttttatctgtttatctgccttacatatcatatgcctagcacctctcacagttcctggcatatttgggaactcaataaatgaactgcatgctgtatttaggaatgatgtggcttagacaaaagaagttcacctaccactcatagttttttggcatttgtggcacacatgtttagctggtctctgcatcctagaacttttagacacaacggtgtatagaagagaacatttcccactggctgctgctttgtgggaagaagaggcataacaaaattcactcacccttccttaaacaaaagtagaggtgcaacttccctgtttgggtttataacactgtagcatctgaaactcagctgcaatactgaattaactgttttccttgtatggctgtggaaaatgaaaccaataactcctcttaatttctgagagcctaaatcccctaggtctgctgcattggaataggagtgtggtttctcgcccttctcacaaactgttcctagaccatgtaattgtttaccaaagaataaacccctaagtgtaggcaataatgcagctatacccttcaaataaagcagaagtggccaacacacagaaacacagatctcttaaagttgagtttttgtgacaaatagtaaatatacagactttctctactgggggcagggaacgcaactcacaataatccaagcacctgcatttattaatgatttgccatgtaaatctgtttccatgaataagtgatcagagttgcagccccagtcagactgcagacctacagccacaggtgatgtctgcagaccagtctccatgtggagcctaggcttccagtgtctgtgtccaagctgtccacgatgtcaagcataacttcagagagcaggtgcctacccttgggcaatttctcatagagctaaaagataataatggggtagggaaattaatttgagttataaatgaaacaagcaatgttatgacaaagaaatatttagaggaatattgaaggattttcaataaaatttcaggagtactggctgggcgtggtggctcaagcctgtaattccagcactttgggaggccaaggcgggcagatcacaaggtcaggagatcgagaccatcctggctaacacggtgaaacgccatctctactaaaaatacaaaaaaattagcttggcgtggtggcaggtgcctgtagtcccagctatttgggaggctgaggcagaagaatggcgtgaatccgggaggtggagcttgcagcgagccgagatggtgccactgcactgggcgacagagcgagactccatctcaaaaaaaaaaaaattcaggagtacaaatgaaaaaaatctgaactctagaaataaaggctaagaaaaaaattcctttttgctggggaggaatctttctctctctgtctcatattgaaggaaaacttagaagccatcaagcactgtatttagtaactgcagtgttgggtagcatagtgtagtggcaaaatcctagatgtgagaccttgctttcagccttccctcagcagttgcttggttttgtctccttgctaacagccttgactttggctttttttaaacaagggttttatgctcatttgtgaggtcttttccagctctaaacttctaggattctagatgtaagaaccagtggagccttaagaataaggaaccaagagtcaacttgattctgtagtaccagcccaatagctcatcacgatagcacaatcctgtgtatgagtcaccaaacttccagtcaagatcctttctctgtccccacagccaagaagaaagtttagtgcatagcagtatacattccttcttcctgactcctgaggattaatctcctcaacatgaggactgaggaggcttccatcttgtggtcactagagcccagcggccattttaggaagcacacacatatctggattagacccatatggctgaccacagctgccccaatgcatgcgaaggcatccacatgccagcattggaaggggtgattcattttgcctcaggactctaaattttctcctgaagtgattgttttcatctaaacatggctccagctgaggtcgcctgtatatgatggacagccctggaggacagaaaaagagaacccttatgttcatcaacaattatgaaatgcctactccgtgtggtaggctgtagggcagtgctttaactttctgtaatagttaattacagttttcacagcacttttcacatacgtttcctcagtaaattctcacacataccctgcaatgcagcctgggcagggctgtgagtgtaacatcacccctgccccttccttttttttttttttttttttttttaaactaaagaagaaactgagatttacaaaggacagggagcaaacttctgcatcccagcctgggccgggttcccctcaaatggacatttgctctctcatgtgggcacactgctgacatctcatttatttcacatctgtaaaaattaattaatactgctctctcctcctcttcatgatgtgcagtaaaggaagtaattacaggacaaaatctgtgagggtgggggctatgtttgtcatttttgtcattgtatccttggccccttgaatacggcaccaggcctgttgagggaaggaggaccacgccaccaaactgttgggatttgtattgttccttcctttcagggaatatctggagaggacatttgccttacatcccaattcacgtaaccaggagttttaaaagctgatgtttctgttgcgtggggtatgaaatagtttgaatcttttcatggtatttttagccctatcagttacttttaccattttgagtacatgcaaataactggaaagcccctgtatttttaattttagtctcatttttaaaaaagaagaagaagaataagaagagtttcaaaaatggtgagtagaggcagtctgatgtccaggtgtgttttattttatgataaacagtcaagccaatgtagatcctaatgaagactgaatctgcaaccaactttgctgaaaggataggttggtaaatgcaacaacttgaaacagtggataagaacatttgtcagaaaaaaacagccaggctcaaaatatgtttgacaagagcaaatgttcttgaaattccattgatgagcagcccatattataaaaacgttgtgcagaaagtagaacagatcaccctttgggcaggtccgtaaagcccagaggagatctgagagaggaagtagaatcgtgactgggaaagaagagatgctaggagtaaccccgagggcagctttacattcacggataagcacagtggcatttgactcgtgcattgactggaagccaaaccctgcatttgtgaccttctaaacaaaccttagtcagacacccattagctcatttcatcttcaccatcgttcttggaggcagctattatttatgattcccatttcacagatcaggagactgagactcaggaaggttaactgcatgcccaggctcacactactaataagcagagagtgagtatttggagactaccaaaacatttccatcgctgagccagttatccatttgacacatggaaatacccaagggtgttctggttctcttgagagagcatctccttgccttactgtgtggcttatttggattcttggttggctgtggtagtgcttctgtcatctcatctccagcagatgctggtgccagtcatcacaggacttggaagctgagtcaggaggaagggaacatgctcctccaagtctgcactaactcctgataacagggaattcagaaggaaggagtcacttggttttctctctttatttatgtaaccttcacagtgcgaggcttcaagctgggactcagggtacagaggtgcaaaagacagatgtgctgcccactttcatgaggcttagagcctggcacagttgtctgttgtgggaattacaaaatagtaggcaactgcccacggctgatgtattttatttggcccatacggaatcctaaacttttgtcgttgttagttcccagtgtttgaaaattgggatagtttatctaaaactccagatttctggcttctcttaacaaatcagaagacttggcaactcaaggtccaacgttaggctgacagcaatttgtcatcactgagcagtgatgttcatcacaaaccgcacctctccctgtgacttccctaacagagagtggtgtcaggtcccacttatcatcacacatttttttttattgtggcgctaaggggaaagatccctaaataaattacatctgcaaagactctgttttccaaataagacgtttctatcaaaatgtaccttttacgcatcctacttggctcttttatataatggtatggctcccaaaggcatttgtttgtgacatgcggatgtttcctttcctgtaaaaaggcagagcctgggaggtgggagtgattactgttcaggggaaggtgaatacgatgtctcttctttgtaagcaggattgtcatgatcttgaaatgatactggggagattttacagttaagtcggttttattttgtttagaaaaaaaactttgtgacaaagtgcaggtaaaagaaacgtgacctgattatgaagtccttaatttaaatgttatattcaagcagctgctagaacagtgactagaacaatccctgacacatagtagattactgataaatatttgttgaatgaatgatttgaaaatgaaattttatgacaccaacttcatttttaaaggaagtagaacaggaaaaggaatctttgaaaacatcttcgcctctgagttttctctggcttcctccttctttcttttcccccacactccacctcatacacatgttagataaaatatgttaaagaaaacttttcattcctacatggtcaaagaagggagcccgcactggttatgttcatggccagggaagtgatgtgattcattgagtgtcctagctttaaaggactaggtgagaatggttcaggtttattttaagcctcatgacttctgttttaggtgagtggaaacatgcactgtaaggctttacagagtttatccatgttctccagcctggatctgtgttgttgtccttgcctacaatgatcttcctctctcttttgtccaaattaagtcccaatcctcctggttaagtcccaattcacaaggacctccatgaatccatcctgatcatttctgtctccggggcccctatgcatagtaataatataactaataacaaatgcgataataacagtaacattaacactataaaataacacttcttgagattttattgtgtaccaggtcctgtgtgaaatactttacatgcattatttcatttggtcctgacacaaatccaactcagtagggacttttatgatcatttccattttccagatgcagaaactgagtgtcagagaggaaattacttgctaaaggttacagagctagccagtggcaggctgcatgcttgaacccagccctgcctgaccacacagcctctgccctcgtgtatttactatgctgcctccctgatttctgaccggttcctggagcacttaaagtggagcaactacttcacactcagcatgtgctgttttattgctacgaacacatctttttaggttcaggccctgtttattcaaataaattatcagggccttgagggcaagaaatgattttatatcagcttgcctcactaggacttagcacaatgctctcaaataataggagcctagttaactgctcctttatttcaacagttctttaatcaaacttcaaaggcagcatttattacatttacaagtcttattgtttgcatctgtccccacttccagcctggaaacatcacatatccctcatccgtgactcagcactgagcacctgggagctgctcagtaaatattgctgaggaattgagttgatggttctcgtcaatactgatgattaaccaggattaacgttttctcttttaaatttcattttccatctctgcgtgccgtctttttattgttctgcatttactcaaattattagacagtgaacttaaaacattcaacttgaaaaaaaattcagcaacgtaaataaataaataaatgtaatccgacatttttatcccttctaattttgttgtagctttccctggacctctatcacactgaagatgatatttacaaactgtcactggtgctggagcctagaaattctaaatcggtaggtattattttctctccaaggatcagtaccaatcactattttttgtcatgtacagtaattggctattacaatgctgctttatgttctaaaacggaagaattttaaaaattgacattattctttctttttcttttttcttttttgaggcggagtcttgcactgttgcctgggctggagtgcaatggtgcgatctcggctcactgaaacctccgcctcctgggttcatgtgattctcctgcttcagcctcccaagtagctagaattataggtgcacactgccacacccagcaattttttttttttttttttttgtatttttagtagagatggggatttcactatgttggccccggctggtctcgaactactgacttcatgatccgcttgccgtggccattacaggcttggattacaggcatgagtcaccacgcccggccattattcccattttatcaatgggacagcttagccctgtcagtttgagaattatgtcttcataccagaggctaataaagaggaagaacatcattctcattactctgttttataattgatcttctatttgttgtgttcctgctaagaactcattacacctaggaccaaaaagaaaggaaaggagtaataactcatcttaatgttaaagatcatttagactgtttcaggctttaaaaaagctccattcaacataaaattagatttaaaattttaaacatctcgatcataatttacaaatttctctactaaccattgattcaactcagaatttggatgtcacattggatggtgtctcacttaatagatggcagacgcttagtaaataaacattatataatgagattgaagaaattgcattattgaatatacaccactcattggttttagtggatggactatattttagatatgctttgcactaatacaaaatgcctggatgagtttaaaatttataatgaggttgaggcttgcatgttgaagataaaatgcctatgcttgcttcttataatcacatcttgagatcagttctcttataaagatctcatccttaccagctgaactctgtaacatattggcagtgactatgccccctaagtttattaatacctactgtgattctgaaccctcagaccgaaagagacagaatggcagtgagagccgtcctctggccctggcagggcatgcacttgagcctgagtcagctgacctggtagcatctgttcttaaaatagtgcatatgcttccatgagcatgttctccttcctgccagtccccagaggctcatctcctggaaatactgcagaacagagccacgtgggatgatatggcacatgcaatggtaggagtgaggacccagactctttaaagctagcaagagtaagaaagctagcaagaaagccaaagctattgaaaaccaaaaaggaatttgtaagcccctccctaattctgtagttttgtcatgacgaacctggccatggtgtattaagccctattgtatgtgtgcatacagaatttccacctcttgacaccaattaggcaccagaatcgcttccagttgttgaatgcctggcagagcatcatacacaggttatcttattaactccgttaagaaaactaggtctgggccaggcacagtggctcacacctgtaatcccagcactttgggaggccgaggcaggcagatcacttgaggtcaggagtttgagaccagcctggccaacatggagaaccttgtctctactaaaaatacaaaaattagccgggcatgctagcatgtgcctgtagttccagctacttaggaggctgaggcgggaggatcactcgaatccaggaggcagaggttgcagtgagctgagatcacgccactgcactccaggctgggcaacagagcaagactccatctcaaaaaaaaaaatttaaaaaagaaaaaaaaaaaaaaacgacagaaagaaaaaagaaagaaaactaggtctggtgagagtaggtatctcactcggatcaaacagctgctaagttggagagctgggattcagtgtcaggcctgtcttccatcccagtgatgtttctaccatccctcatctcagggacaacttaggaatagccattttaccacacttgcctgccttgtgtgcctttagttttactttagtttattttcaggatcttttttttttccaattttaggagatatttccatcaaacatagaaaagtctttttatttgttgtaagagtagaagcttttgaaagtcccttctaagtgctaaaatcctacgaatctaacacaagacatttcccagtctctttctgtctcttctctaagtggagtgtcagcctatttgacatgtcctgttgagatgggagagttccctggatcccttcactgagacttgcgacagaggtgtggccacattcaagccctttgctggaggggaacatacagacaagtgggtgccggcgtgggggccggggagagtgcttttgggctctggccccaagacagcatctaggggtgtgttacagttaatgctcttttagcagttgctgtccatggatggctaagtcttaaccagctcagtggagagtcagggtgacagccttttacaccctaccttcttggtacctgagtccttgtctggcatctaagaagaatcaggtcacatggacttgaaggatggtgaaggcagaggttttattgaatgacagaggtggctcttagcaggatggggagctggaaaggggatggagtgggaagataattgtattagggttctcttagagggacagaactaataggatatatatatatatatatctcaaaactcctgtgctgatcagtagtgagatggtgcctgtgaataaccactgcactccagcctgggcaacatagtgagaccctgtctctaaaatacacacacacacacaccgccccccccacacacacacacaagtatatatatctataaatgtaatttttttttttgaaacggagtcttgctgtgtctcccaggctggagtaccgtggcaatctcagctcactgcaacctccacctccctggctcaagcaattctcctgcctcagcctcccaagtagcttggactacaggcatgtgccaccacatccggctaatttttttctatttttagtagacagggagtttcaccatgttggccaggctggtctcaaactcctggcctcaggtgatccacctgcctcagcctcccaaagtgctgggattacaggtgtgagccactgtacccagcctctataaatataaattaaaaagaaaagatagaaaaaaatagatttgcatgtgtgcaccagcaaaaatgttgacattttatgaaggtttcagggagaggatataaagtgaacaccagtcttggctggtctcctgaaaggattgtgttctgtgcttgtgttatccaagcatgttatgcattgtgctaccatcttccccacaactttatatgcaaatgtcttgtaagaatgcagaaaaatctgtggagaaagaaagttcaccaaagagggccagagagacctaatgattggcagaacagtcagaagtgcttaagcgtattgagcaaggtgcagacgtaaggacataaacttggccacccactggtacccatttgctgcatgcaccataactgatcactaagtattagagaattagataactggtgtttttgtatcctgtattacacaaaaatccatgatggattgttatataaaagttttagtgatatttggagaactcggataggatttttggatggactgggagcgcattgcttttttcccatttaaaataatggaatttagtctggatgtggtgactcacacctgtaatcccagcactttgggaggccaaggcaggtggatcatctgaggtcaggagttcgagaccagcctggccaacatggtggaaacccgtctctactaaaattacaaaaattagctgggcttgatggtgggtatctgtaataccagctacttgggaggctgaggcacaagaatcgcttgaacttgggaggcagaggtttcagtgagccgagatcatgccactgcactccagcctgggtgacagagagagactctgtctcaaaataaataaataaataaataaataataaaaataaaataatagaatttaagttgctgttaaacaaaaggcagtatctaaacatgcatttagttacagattagattccattaacataagatgcttgttttataagcatttaatagctatataaatgtaagtttctactggtattatgaatatacaaaacttattcattcttctcagtgtccctggtcctagttgttcaaggccccagttaatgttgaaaaatatggccaggcgtggtagctcatgcctataatcccggcactttgggaggctgaggccggagaattgcttgagcccaggagttagagaccagcctgtgcaacatggtgaaaccccatttgtactaaatatacaaaaattagctgggcgtggtggcacacacctgtagtcctagatacttgggaggctgaggtggaaggatggcttgagcccaggaggcagaaattgtagtgagccgaaattacaccactgcactccagcctgggcgacagaaccagaccctgtctcaaaataataataataataaagttgaaaaatatgtggttttttttttgtttatcagcagcctacctcccctacgacgcccaacaagcctgtggtacccctggagtgggcattaggggtgatgccaaagccagaccccacggtcatcaacaagcacataaggaaattagtggaggtaagtggttgagggagaataaagagagggcactagaagaccctttctctttccagaatgttctgcgattgtccaggaatctgatggaacccctgaaaacaaccctctggcaggtaggaacaatttagcaggcacttagtcctaccaggcattgggtcctggggagagtcgatcagaaaggcccttttccctttgttgtctctcttgcccagatactctcagctacttccagctcctctctttcacaggcatttgccacctctgtcattgtcaacagctcaagggattggggattagaatcactcatgaaaaacccacataggtcccactaagatgcccaataaattgattacccaagggcaggaaagaaatcctgtaagttggatagtttctccttttgtatagttttggaattttatgacacagcagcccgatgttactgagattagaaaaatcacctaatgtaggacaaggctctgtcagagttttccgtgtagaaaaaagagtagggccgggcgcggtggctcacgcctgtaatcccagcacttgggaggccgaggcgggcggatcacgaggtcaggagatcgagaccacggtgaaaccctgtccctactaaaaatacaaaaaattagccgggcgcgatggcgggcgcctgcagtctcagctactcaggaggcagaggcaggagaatggagtgaacccgggaagcagagcttgcagtgaggtgagatcgcgccactgcactccagcctgggagacagagtgagactccgtctgaaaaaaaaaaaaagaaaagaaaagaaaagaaaaaagagtagaagtgccgatgggggaacacggaaacatctcgggtacaggaaactgcgatcctgaattaaatgtctactttaatggattggtaggtacatctgctggtgcaacagaattgagtctttgggatagaatgtgctttttgctgggagaagatatttaaagaaaaagaaagaatgtcttacatcttggataattcagaaaactaggaggtgctgaaagaaaaattttgcggagtgtgttaggcaggcaggaaaatggtggtgccaagaggaatattagtgagggaagggctgagaaggagataaggtccagtggagcccgtggtagtaacagacccagcttggagctggggaaggtgagaaaaggatccaggggtccccagggaatgcaaggactgagctgcagctcaggaatgtctgaagccaggaaatagaaggcagagctgttccctctcccagtctcattctacatactgacttcctcagtccacatgcggaatttctctctctctctctctctctgtgtgtgtgttttgtgtgtgtgtgtgtgtgtgtgtgtgtgtgtgtgtgtgtgtgtgtgtgtctggggaatttctctctctctctctctctctctctgtctcattctgtcttccttaccttttctctcttcccttttctccaaattccttaccattggttcagtcaaataaaagaccaggattttatgatgaattttactccgcaaaaaatcttctactcgtggtataaatatggatgttaaactataaatagtaggcattccaaaatagttaacttttaagctatttttattatggctaagtaatgatactggaattaaaaaaaaaaaggtaatgttttctgattttgcacaattctgttacctacaaaaaagcttgagatgggctcattttagtcacatttttaattaattcattcatttataccttacctacttcccaaaatacttgcaacacagggcaatagcgatagatagaatagacagaaactactgggaattaattaaaactggagattaattaaaactggaatcaaaatcaaatataaatttgtatacatgtgtttgcagaaagaacttacaaatctttttgaaaacctaattttgcagagggcaatgggaaactttttttattcttctctgattataaaggaagatagaatcatcaaaaatattaaagcattacataaattatagaaaataaaaagctttactttcaggtcttggtaattctattctccaaggataaccactgatcatttgtagattatctaatatgactttattctctatctctacatatgtataaacacacatatactacatacatatatacatgtgtatcttacgcaactttgttcgattatttctttaggacagattcctagaagtggaattgctgtgtcagagagtaggcacttaaaattcctgattgtcctccagaaatattgtggctatttacgtcactaacttgatacaagagtacctgttgtctcataccctagaagatgatcgattacagtattttaagattttatttaatctgagaggtgaaaaaaagcttcattaatgtttctgtaatgattagctgagctgaataactttccatggatgtattgaccatttgtatttttatttggtgattgcctgtttgacttttgtgtctttgctctcatatatgctgcaaataacttgctctgtttgacatttatcttaaaatttgttaattgagcttttttggttcaatttttttgcattttattaaataaaatatttttctttatggcttctgacattgatgtcatgccaagaaaggcctttttcacacaaagattatgaaacatgaaaaatattttcatctatttatctttggtacttttatagctttgggtttttttgcattaaactatataatacactagtgcagtggctcatgcctataatcccagcactttgggaggctgatgcaggaggatggagtttgattctaggagtttgaggctgcagtgagctatgatcatgccactgcactgtagcctgggcaacagagtgagatcctgtctctaaaaagaaaaataaataaataatatataatacatctagaatttagtttggaggtaatttattttgtaagattattagtcatttaactcaacagcagttattggataatccataatttatctgtggattttaaaagatactttttgataaattcctatacatacatgggtttgtttcaggactccactctctgtggtaatttgtatcatgttgttttgattaatgtagctgtgtagaatatttgatttctgaaagggcatgttccccctcattactcttcatttaaaataatttttagcctgttttcaacatgcccactttgatttgaactttataatcaatttgttcatttaaaataaatccctactgggattttgattggaattgcattaaatgtatgctttaatttttgagataacaccttaaaactttattttctattgtcatggtatttgaatttgtaaattcactaagccaatttctactcaaccctgaggtttcagtttaaaccttgcttttcccaggaaacctttcttaatccacctcctctttcccccccccaccaatatcactctattttatttatttgtttattgagacagagttttgctattgttgcccaggctggagtgcaatggcgccatcttggctcactgcaacctcctcctcccaggttcaagcgattctcgtgcctcagccccctgagtagctgggattgcaggcatatgccaccatgcccagctaatttcttattttattttatttttagtagcgatggggtttcatcatgttggtcagggtggtcttgaattcctgacctcaggtgatccacctgcttcagcctcctaaagtgctaggattgcaggcatgagccaccgcgcccagccgaagttttatttttaattttatttaaaatttattttttagagatgatgccttactcgtttgcccaggctacagtgcagcggtgtgatcttggctcattgtaacctcaaactcctgggctgagcaagtctcctgcctcagcctcacaagtggctgggactataggcatgcaccaccgtgcccagctaattaaaaatgtttttttgtagcaatgaggtctctctatattgctcaggctggtctcaaactcttgggctcaagtgatcttcccacctctgcctccaactcccaaagtgctgggattacaggtgtgagccaccacatccaaccattactctgtttttatcctcatcaaaccacttgtcttgttatattataaaggcttcttgacttagttatctttcactagattctaacctccttgatagaaaggatcatatgctagttatcgttgcttttgcaataacaagttcagagcctgccttatagtcattcaataaatacttatctttcctttgcagtctgtatttagaaactatgatcacgaccatgatgggtacatttcccaagaggactttgaaagtatagctgccaattttcccttcttggattccttctgtgttctggacaaagatcagtaagttttaattttgttttattttaatgcaactatcctaaagcagaaaattattatcagaggagagaagggaaacttgtaatttgcatcttgacagcttcaaccctggtgctttgatgagccaggtttaatttgtcactgattattttcttggtgtgtatgaacatgacctgaatggaatcacagggaagaccatgttgtcagtgttgaacacaagtgcacatttgtaaattatccaagcactccatttgctatattgcttctattgcttagctctcaacctcaaaaaatctccaccaaaaaagagtagaggagaaatattgttagatctaacctgggagagtcctcaaaattagtgcacctggaagcaatcttaaaattcatgaagattttaaaaaaattttggccaggcatggtgactcatgcctgtaatcccagcactttgggaggctgaggcaggcagatcacttgaggccaggagttaaagaccagcctggccaacatggtgaaactctgtctctactaaaaatacaaaaattcactgggcatggtggcacaggcctgtaatcccagctacttgggtggctgaggcgggagaattgcttgagcctgggaggcagaggttgcagtgagctgagatagcaccattgcaccccagtctgggtgactgagtgagactctgtctcaaaaaaaaaaaactcacttatagtcttcattaaagcagatgatagctgcagacagccaagaagcattcatgctttgttttctctttgattgatcaaaggttgtcttgataaagaaaaaatatattgctttttagcgtcaaatgattcctaaaaattaaatcgctttagatactaaaacccaactcattaaaagaaaataatgatctgaaaaaaaaaactgctgagaaatcctggcattaataatttgattaattgttaatagtacgagattagttcctaatttaaaaatcacctgtaaggaaatgctggattttgttttggtaaaatgggcaaattaaattacattaaaattctctaatatttttgctggtatgagaattcttaaaaaacgaaatctggagccggatgcgatacctcacacctgtaatgccagcactgtgggaggctgagatagtaggattatttgaagacaggagtttgagaccagcctgggcaacatagtgggaaccttgtctctaactatttttttttaattgaatttaaaaaataaaatctgtaattcaacacaccaagaaaagtcttgacacattaacataacttaaaatcttaaattcatcttcattatatacccagaacaaagaatacttttaaaataaatttaattagaaacattaacttcctttacaaagtaaaatttaaattgcctgctaactacccacttctttgcttagtttgttactattagtgacatgtaaataggacattgacttaaaataacttcctagtcttcatttcttttatctgttggttctagagacaaaattgagattgtcctagcaaatatttgtgtctatctctatctctatatcatccttatctctacttattgatatctatagaattgttttctatgaatgaaggtttggactattcatatcttgcttacatgacactaaagttttgagtggttaatactggaaagtctcaaaaagatgttttctctaaggtactgttttccaaacgatgttccacagaagtagctattaattagtacttttgaaaaaggaactaagtagtcacatgtgagaaacacagggttaaatctcattaaataggtgtctttactgtgtgacttcccaaagcttttaataggctggtgtattacgctgtgagtccctaggaggggagatgagctaatgcactgttacacaaatttatgtaccaaatgatgtaataaatttgtgggacaatgcattcataaattcatttatcatatatataataaagattgtttttggcctcttcattatgaaatctgtgcccattcctttgagtaggcaaaggacatgaatagacacttctgtaaagaagacatacatgtggacaataagcatatgaaaaaaagctcaatatcactgataattagagaaatgcaaatcaaaactacgatgagatatcacctcacaccagtcagaatggctattattattattattattacttttctttgagacagagtctcgttcttttgcccaagctggagtgcactggcacaatctcggcttattgcaacctctgcctcctgggttcaagtgattctcatgcctgagcctcctgagtagctggttataggcatgcaccaccacgccaggcaattttttttttctttttttttcagtagaaacgaggtttcatcatgttggccaggctgttcttgaactcctgaactcaggtgatccacctgccttggcctcccaaagttctgggattccaggcgtgagccaccgtgcccagccaagaatggctattactagaaagtctaaaaattggctgggcgctgtggcccacgcctgtaatcccagaactttgggaggctgaggtgggtggatcacgatgtcaggagatcaagaccatcctggctaacacggtgaaactctgtctctactaaaaatacaaaaaattagccaggcttggtggcgggcccctgtagtcccagctactcgggaggctgaggcaggagaatggcatgaacccgcgaggcggagcttgcagtgagccaagatcgcaccactgcactccagcctggacgacagagcaagactccgtctcaaaaaaaaaaaaaaaagaaagtcaaaaaataacagatgctagtgaagttgcagaggaaagggaacacttatacactgttgggagtataattcattcaaccattgtggaaagcagtatggcgattcctcaagcagctaaaaacagaactacacttcaacccagcaatcccattactgggtatatacccagaggaatagaaatcattctacagtaaagacacaggcatatgagtgttcattgcagcactattcaaatatcaaagtcatgtaatcaacctaaatgcccatcaataacagattggataaagaaaatgtggtacatatacatcatggactattatgcagccataaaaaagaacgagattgccaggcacggtggctcatgcctgtaatcccagcactttgggaggctgaggcaggcggaacacctgagtcgggagctcgagaccagtctgaccaacatggagaaaccccatctctactgaaaatacaaaaattagccgggcgtggtgacacatgtcggaggctgaggcaggagaatcacttgaacccaagagggagaggttgtggtgagccaagatcgcaccattgcactccagcctgggtaacaagagcgaatctctgtctcagggaaaaaaaaaaaaaaaaaaaaagagagagagaatgagatcatgtgttttgcaggaacgcggatggaagtggaggctatcatccctagcaaactaacgcaggaacagaaaaccaaataccacaggttctcacttctaagtgagagctaaatgatgagaactcaagaacacaaagaagggaataagagacgctggtgcctccttgatggcggacgtttggaggagcagaaaaaataactgttaggtgctaggctgtgccaaatttccccgcaagcttgagaatatagaatcctttttttttttttttttttttttttttttgcctcctacgcaaaataactttaataatacttataaagtacaaaaatcaaagttattttgcataggaggtaagaaagggatcttaagttctcaagcctgggggaaaattgtggcacagcaaacagtaatagggaagcctgggcagggagtacagggaagaaagagatgaagttggacttagatccgttgattgagacagagagtggatcatcaggaagagaggtctagcaagttgtcaaagatgcagtgcaaaaattcaggacaacagtcagggctggagatggagattaagtcttcagccccactgtaagctggagtctcgatcttgtgagcaaactctggtgggaactcttagagggaggtgagctcagggcctgaggaatgagccttcagggactcgcctcctacatgcaggcattgaaaggagtcagagggccctgcaggtgagctggagaagggggagctggagaggaaggaggagaagcggggtggcatgcaattccagggtgcctaaggggagagcgccaaaagaaggaaacatgtctccgtgttacctcctgccaatgagaaaaggccactgaggatgttcttggtgacagatttgtagggttagaaaaccaagtggcataaacagtacctggaggaaatgataaaagaacctaagggtttctctttttgaaaacttcgggagtaaaagaaggtagagagggctgggcgcggtggctcacgcctgtaatcccagcactttgggaggccgaggcgggcggatcacaaggtcaggagatcgagaccatcttggctaacacggtgaaaccccgtctctactaaaaatacaaaaaattagctgggcgcagtggcgggcgcctgtagtcccagctactcgggaggctgaggcaggagaatggcgtgaacctgggaggcggagcttgcagtgagccgagattgtgccactgcaatccggcctaggctaaagagcgggactccgtctcaaaaaaaaaaaaaaaaaaaaaaagaaggtagaaagaaaagacatctgttggagatggcagcaggactgaagaaggggatttttcaggtaggaaagtcctgagcgtatttgtgaacggaggaagaaacaggggaagagactgagcataacctggaaggaggagagtcccggggaggctggagagtgctggatggcacaactcttcctctgagagaggactcccaagagaggacataggaggtagaaaagaattctgaactggaaaggaaaggtgtgatcgccagcaaatgctaatggacaaagaagcaagatagagctcacctgtgtcaagtggatccaattattattattattattattttttgagacaagagtctcactctgttgcccaggctggagtgcagtggtgtgatctcggctcactgcaatctctgcctccgtgactcagcctcctgagtagctgggattataggcacacaccaccacgtccagctaatttttgtgtttttggtagagatggggtctcaccatgttggtcaggctggtcttgaactcctgacctcaagtgatccgcccaccttggcctcccaaagtgctaggattacaggcatgagccaccgcacctggccgatttgatcatttttgataaacaagaagtcagcgtatgtggtgagtaggggtaggaaggtgggaaggaccagaggtttgttctgtgtggagtagatctggaagaattgctcccagccagtcgcagtgaatgggctatgagccactaagatatgagtgaaaatatcaccaaggagcccggacagcatcaagctgaatgaatttgagaatggtcagcccagttattacagttctctgcctttctccatcatcctaattcttgcaaccttacagctaggcaaggactagaaagatgtccttcaggaagctgcttttcataataaagactttctgtgctgcggtgcacaggccacatgtgtgcttacatgaatatgctcctgcacacacacacacacacgcaggatgcacacatacacaattttctgcttactgaaaaaggctttgaacacctgaagatgccttttgaggtttgctccttctctgagatgtaatagagaagtgaatgtgcctcaactgcttttggccacaaaggtttgggaggtgggtgattaaagtgtggcaactacttagcaacctgttatttaaagattccctcccttctttgattctcttaacagggatggcctaattagtaaagatgaaatgatggcttacttcctgagagctaaatcccaactacactgtaaaatgggaccaggatttatccataattttcaggagatgacctatctcaagccaaccttctgcgaacactgtgcgggatttgtaagtctgttttccgttgttttcttatgtgtgtagttatttgtgtggcattctgaaaaagtaggaaaatgatacactaaataaagttcactgtctgctttgaatcagaagtaaaatgtgatggctccctgaaattgaagattaaacaccaaaggcaaggtttagttattttctaggaatgcagggctagcaaaaacagggaaggctggtgagggctgttaactcaagagagtggttttgtttattactccctgccagggaaaagtgtcagcccaatgagccctggcattcatcactaatattcataagtggttgcaattaagaggtgcatttatcttagcgagttccttccagttttcatttcatggggtattagtgaccagaaatccgtcatggcatggttcaataattcacaactcaaaaaggaagaaaaaatctttttggagagaagctggttataataataaataacatttactcaatgcttgacggtaacaaagtacttccatagacattatggtaactaatcctcatagcaagcccttgaagtgggtattttactttcaccatcttgcttatgaagatagaggttcaaagaggataacccaggttcccgaggattgcacagctaatcattaccagagcttggactccgacacaggtgtactgactgtcagccctgtgcttcacctacaccactgcaacaaattaagactgcatgcttccttcccccacctttgataattctttgggaaccaaggtcagtttttgatcctggccttaacagaaactcctgggccctgaatgtctccagttgataatccaagttaaataaaatgggaaatgtggtattccaggtgagggaggcccagcacccagaggagtatgacaatcgcccctttttctagatgccagagctcagtcgtgttagctttatttggcagccatgtcctcctgttgactcgttgacccatattgaatttgttgccgatattatacgctaccagaaattacatttttcccatcccatgctcaaagaactggctttcaggagcccaatgcaggagtctgtgttcaagcacacactcctctgagaatgggtaaataagaggcagccgtttcctcaaagacggccccaggtggtcatagcagctgatgtgacacaggggaaagccagtctaactagctctctttattcactgcagagaaggtgaagttcttctttagtatctccactgggattgcatgaccagaccattttatcataaaacaaatggttggccaggcgcggtggctcatgtgtgtaatcccagaaatttggaaggccaaggcaagcagatcacctgaggtcagaagtttgagaccaacctggccaacatggtgaaaacccgtctctaccaaaaatacaaaaattagcagggcatggtggcaggtgcctgtaatcctagcttctcaggaggctgaggcaggagaatcatttgaacctgggaggcagaggttgcactgggccaagatcatgccactgcactccagcctgggtgacagagcgagactcagtctcaaaacaaaacaaaatggtctcctttttcatgtttctctattctgatggaaatttttggaaatacctagacctgaaaattctgatgtgggatggggccgtgcataacacgctcctacagagtgggacccagtaaacaaaaggtcaggctgctgggccatggtatggctcagccaaaagtcaggatgatgcatctgtcttttggtgggctgtgagagtcagaagacccttatcaaatctcaaggtcccgggtgctgtggcatggacctgtagtcccaggtactcaggaggctgaggcaggggtatagcttgagcccaagagttcaactccagcctgggcaatataaagagacacctgccactgccatcgctaaatataataataacaataataaaaaactcggccaggcacggtggctcacgcctataatcccagcactttgggaggccaaggcgggtggatcatgagctcaggagatcgagaccatcctggctaacacggtgaaaccccgtctctactaaaaatacaaaaaattagcagggtgtggtggtgggcgcctgcagtcccagctactcaggaggctgaggcaggagaatggcgtgaacccgggaggcggagcttgcagcgagccaagatggcaccactgcactccagcctgggcgacagagcaagactccatctcaaaaacaaacaaacaaacaaacaaacaaacaaacagagaaacaaactcaagatcttatctccgctctctagtccttctgtcctgcccctcccttttacagaggccctgattctgtaggagcagcaaggtagactttcttggaagttccacacctgtctccctgactcattggagcagacctgctggtgctacattcttgatgcagctgtgatgaagtagaaagctctggacctggagtctggaaccctgggttaaagttttgcccttgctaactctatgtccttgaccaagttattcaccatctttgggtctatttctatctgtaaaagggagttaatacttacccaccatgttgttgcatgataaaatactattagacacgttgcacgtcacatggctcggagtacacattttttatgtattccttgatactttgagagtttaattgaaattaactcatttaaaatttttacagctgtttttgtttttaaaatatatttaattttattggtacgatttgatttgatctttactgacactcatgtcaaaaagcccattggttttcaaaggaatttataactatagctctatagatgtgtcattgaaaggaattgtgggagaatggttccagtgccggaaccatctgcttttaaaataaattccattttaagtttaaggaagacaaacagacttgctctgcagaagatttactttagaattagaattccagaactgaaagagtgttagtaattcccttattttgtagatgaagaaactgaggtctggagaagttaagtgacttcccccaaggtcacacagatcattagcagcaaaaccatgagtcacacccaggtctcctgactctcagtccagtgtgccttacaccacaattactccaaatatgacagcagccggtggtctcaaatcaaaggactgtgggaaatactcctgcatacccatccacatgagttcatcctctactgttcttggcaggcacactgacccagtgcctcttcctagctactgtttgttcctggctattaagtaagcattagcaaacctacctccccacccccacccccagcacccttgcttgactgtatctttttcagcagttcctgcagcaatgctaataatgtaacatatctggatattaggatgtctcttcttaaatcttatcctttcttgtcccacctcagtgcctttgctcacacaacagtatgcaggggcaatggcttcctgtctttccctcaagtgacacattcttctttccctcactagctatgagaccttgccaagggactttacctctctgtaggtcagtctcctcatctgtaaaaatgagaaaaatattattacctacaccataaggacatcatgagcaattaaataagctaatatgtataaagagcctaactgtgcctttcacatagcaagagttcaagaaatgttaactatcatcattattattgctattatcattaccaagggctccagagaaagaatttccaggttgtgggagattgcaaattatctaacttcctggatcatcacattcaccttttacaaaagagaagcaaactagattatcataaagatcaagctgtgatgatcctggccaccactgcccttttctggatcatgcccctctctcttccagccatccttgcttctacttagttgtcagataatccttcctgtccctaagacaaaatactgctctgtcctaggagacatttgcattttatttatttattattattattttttctttgagatagaatctctctctgtcgcctgcagtggcgcgatcttggctcactgcaacctctacctcctgggttcaagtgattctcctgcctcagtctcctgaatagctgggactataggcacacaccaccatgcccagctaatttttgtatttttagtagtgacggggtttcaccatgttggccaggatggtcttgatctcttgagctcatgatccgcccgcctcggcctccgaaagtgctgggattacaggcgtgagccaccgcgcccggctgacatttgcattttaatatgtattctgaaggaccaaatagctgttaaggctcaaaggaatccttgagttttctacttgtggaagttccttgtcaaaaagaagtaaggagcagtctttgtatactcttgagtcacttcacattggctgtgacttactcttctggaagagcgggccatgctgcccacatgtgggggcattgttcacttataatacattgtgaacattgtgaacggcacccccatcagtcccagtgggccctgctttttcaacattattttattaagtagataatagccacctaacccaaacacaaagaggttagcaatagttcttctccaacttgagctaagcccatttaattacccatactgtatgcctctggtgaatctgtcaccccatgcaagaggtgtggggaggcacagaagggcatggcaaggccctcttctttttttttgagatggactcttgctctgttgcccaggctggagtgcagtggtgcggtctcagctcactgcaagctccgcctcctgagttcatgccattctcctgcctcagcctcccaagtagctgggaccacaggcgcccaccatcatgaccagctaatttttttgtatttttagtagagacggggtttcaccatattagccaggatggtctcgatctcctgacctcgtgatctgctcttctcggcctccaaaagtgctgggattacaggtgtgagccaccgcgcctggccaggccctcttctttatggtgtttagaaggagtctgtctggagagcgaagacaccaccaccaggatgtccctgaaccccctgggcaaacgctccctcgtggaactgcaggccctcacatctcccctcagggatttgtcacttcctacttgttaaccacgaggatgtcacagactccttgcttggcagaatctgagctttttcgacatctcctacaaccctggcacaggccaaacatagagcaaatgtggagaatgaagacatgaataactaagatcatttcctcttctgtatttttccacgggacaaatactactcagaaaatagcctagcaaaatccaaatgctttcacatgaggtgcgcttcttccattgcttcatttcctgtagtgggcgctaagagcagctagtgtcattaaaaagagagagccaggggctcccaaagaccaagtggccatctcctctgtacattttgctgagagcgcatcaggccaaagtctggtgcatcaaactttagtagtttcccatcccggctcccagttggctctgagaaagaaaagggaaaggaaactcatgttatcaccacagctggaaggggccgggagagggttcttctatctggcaggaagggtgttaaaagtggctacatcctgtttgtgcctggccagtcctgaagcttcccaggacttccttttcagtggccttgttttccttccagatctatcctcagattccctgacattcctttgtcttttgttacagctctggggcataatcaagcaaggatacaaatgcaaaggtaaatcaatgttattttgttacaatttttaaaatgtgacattttgggtaagaatcaaatttgtctggttaaactacaaaagctcttgccattattcggaatttcagtcttttgggtcaacggcaactgagaatgattgcctctgaggaggagtttctggagttttggagagctaaaattggaattttatagcttgttacaaaccactcttatcaacacacataaatctagttctttggaatcagcagcatccagttaaggtgggaattctgagtgggacaagcctagctaaaatactgaatataagaacttcttccttcaaagaaaaacacctacacactatttctctaatgcacaggcacttcttcccactcacacttagctattcctttctctactaaatcacatagatggtgacaaaaaacgaggagaaaacttaaaacgtaattttgtccttttcaatgaatgctttcctctatctttcccatttaattaagtttataaacaattgaatcaaatatatttgacaaatgcaatatgcatgtatactaagcatttaggaatgtgttgctacttgtacatatatgatcaagtatacattactgttgtttaagaagttgctggacactttatgtggacagtttatatggttcttctaataatctttttttttttttttttttttttttttgagacggagtctcgctctgtcgcccaggccggactgcggactgcagtggcgcaatctcggctcactgcaagctccgcttcccgggttcacgccattctcctgcctcagcctcccgagtagctgggactacaggcgcccgccaccgcgcccggctaattttttgtatttttagtagagacggggtttcaccttgttagccaggatggtctcgatctcctgacctcatgatccacccgcctcggcctcccaaagtgctgggattacaggcgtgagccaccgcgcccggcctcttctaataatcttataaagcttttgaaaaaatataataaaactacaaaaagaaacatcttaatcacagaataccttcagatgaatgttgttccccagggatgccttttttctccagtcgttttccagtatttcgtcctcattttgcatgaacaaaaagcttcccaaatctcaatggaagccactgtttagtgctcagagggaccttcccattagtgcttctctatcacttgccttggtctaacttagatttttactttcaagcagcaaagatactgcaagatcttattgcccagcagtgagtcattagttttattctggtttctatcctcataccctaaaatacacacacacacacacacacacacacacacacacacacgcaattttataaagatgaaaatctattacacctttggattatctcttgtattttcttaatggcacataaagtgaaaaaaaaaatgaattgaaatagattgaatacatcattaagactatttgaaacaaggtcacttaggggaaaatgggtactggaaatagttagaaaggtcctccttgatggtaggagagaaatgatcatctctattcaatgattctcagtgaagtgcaggaccctcatcataggaaataattgtgaaccaccatctgaagtggccacatttttctaccccaagtagtaattaacattctactgtcttatctaaaacatcctaatgggcaattcacagactctgctgcacgctgtttcaaagccataagcaaatatagaacatatttactgagcatatgcccatcttgtgttctgttggaagcagaagatataatcactggccctgaaaggttttggaaaatgaagaagagtaaaaaaatccagacaaggccgggcacggtggctcacgcctgtaatcccagcactttgggaggctgaggtgggtggatcacgaggtcaggagatcgagaccatcctggctaacatggtgaaaccccgtctctactaaaaaatacaaaaaattagccaggtgtggtggcgggcacctgtagtcccagctactcgggaggctgaggcaggagaatggtgtgaacccgggaggcggagcttgcagtgagccgagatcccgccactgcactccagcctgggcaatagagcgagactccatctcgaaaaaaaaaaaaaaaatccagacaagtgctgagtggaggaacacctcacagtaaatgatcagaggcagttggcctgggagagactagaagctgaggcttcttgccctaatgctggcataggctctctttgtggggattccgtctaagcctgggaaagactctcaaccccatttgatttgcatttagttttgggcaaaggcaactgacctctcaggctggactctatttactccctaggcacaattgctcattaggtcctcaattgcatacagaaccaagctgagcaaatctaagagaattttcggaacctcaggaaggcaagtgcagaccaatggcctctttccagatcctagacacaccccatgggcctgagctcaactctgaaattcaacacagaaactggggtgggggaggggagggctgacaaatcaagtgccaccctggaaactgaatcaacatcagacacactaatcatctgcgacacccttggaatttttcagactgtggagccaattgtcacaaacagtgcaaagacctcctggttctggcctgcaggagatttgcccgggcgccctccttgagcagtggtcatgggtcactgcctggaagcccctcgctgcccccaggtaatgccctctgctttctttgctgccatggtctctttctgcttgcctcctcacacttggacctcatttaggttctgggtctaaacccggtcagtcactctaaacgctaaggccttctttagggtgagcagcagtagctaaacccttgaatcatccttgcttctctctgctttctagtctcaggaatatgtaacttgcctgcggctaattgagttctgtcccttgtcggttcctctagaatgttgcatgccagactcgtgctgtttgcactaaccttgatgctttgctgtcaagcagtcagatgtcaaataatcaccaccctttttcacttccagcgcaggatgaggtgtttgagttccctggagtcactgctggacacagggatttagacagcagagccatcacactggttacaggctcttctcgcaagatctctgtgaggctacagagggccaccaccagccaggccacccagactgaacctgtctggtcagaggctggctggggggactcggggtcccacaccttccctaaaatgaaatccaagttccatgacaaagcagcaaaggacaaaggctttgccaaatgggaaaatgagaagcccagggtgcatgctggtgtggatgttgtagaccggggcacggagtttgaacttgaccaggatgaaggagaagagaccagacaggatggtgaggtaagtgctaggtcaacccacaaagaaaaccagaagaaggaggctgaaagtgctgagatgagcgttacagagggtctggggggcagcctggtagttctgaaagcagaatggttgggaatgaagacatgtatcacttttagtcttgccactgcctagctatgtgaccctggacatatgtttcttctttatggatctcagtatcatgatttaaaaaaattgaacgagatcaagttctgaaacctattgaaggctgtcatgtgtgcgtactgaaatgatgccccagaaacccatgactatatatccaaaataccagtacacgatacagatcagcttggttttccaagctagaaccagggcccagactcaagaaaggcagtagaagcaaaagacttttagataaaggagaattggaaacttttcattctgctcaaaagaagcttttgacagcatcatggaaaagggggtggtgagaatcagagatacgaggcccttgaggatctctaaaccaggctctgcctccgcatgagcaaaatcatgcaaagcaaagtaggatgcagatggaatttgttagagtatgctgacacagaaattgattcaagatggagttagataaatttattagttaacagtctatagtgtattaagagaaaggatttgagaaaattggcatgatattcctaacatttaaagcaatgtcatggaggacagccattgccaccctgtcgaattgttctcataaacagaatattgggttaggcagagatcctactggatcaagccagtgctctttagtcttatgggtggtcctccacattccactcttcaggagacctaaacacacgtctccatacatttcccatgatgagaaaaactccagtgacctttagccagaaattcccctagttccttcctcactgaaggcagtgcataaggaggccacccattatctctggtcatacaaggtttattgtaagtttctgctgaaacactttttttgtttctataacatccacttttaaaaacagctttgagatgtaattcatatgccatgaaactgacccatttaaaagtatgcaatttagtatactttcagtatgcttttagtatactcacaaagttgtgcaaccatcactacaatctaattttagaacattttcattattccaaaaagaaatcctacacccacgagcagtcattctcccccaactcaccccagccaactaatttattttctgtctctatagatttgcaatgcccactttatttttaacatttcccccactgatcatcttgacaactgtatcagtcctatccccctacttcttttactggcctagcacagttcaagctgggaatataaacgagaataagagaaagatcatgattaggtgtcaacagctcttaacccgaggtctatttaatggctttagggtgttcatgacagtactttatactccgtgtaaaatatacatggacatatggtcacttctgggaagaggagtccatgcattaaacaaacagattctcctggggggtatgtgatccaaaaaagcaaagaatcattgtgcaagaagattttctggattccctgtctagtcaccccatacactaactcagcctgcagaggctgtttccgtgggtgctgtagctgcccctggaatgtcagaaaaagagcttctccaggtagatggtaggacgcctaccagagtgctcaggatggcgcccaccttgtgggcatctctgaattcagaggagaacctgcttttgtttaacaaatagtgaaattggccatgagctcattactattggcctctcacagttcaagttacttaaaaactgtgcttctgagttaggagaaattcacagcctgttgggtgtaagacaatcaaataggtaagatatcctgatcattaatctctataaggaaatataaacaagtatctgggtttttaaaaaaatttaattttgtttcctggaaattgaacttttatattcaaatgctctcttatcctttctgtgttcttatctcttttctttcttttttttttttctttgagacggagtctcactctgtcacccagggtggagtgcagtggcacaatcttagctcactgcaacctctgcctcccaggttcaagcgattctcctgcctcagcctcccaagtagctgggactgcaggcatgtgccaccatgcccggctgatttttgcattttcaatagagacagggtttcaccatgctggccaggctggtcccaaactcctgacctcaggtattctacctgcctcaaactcccaaagtgctaggattacagacgtaagccatcgcgcccagctgtgtttttatctcttaaagcacagggatggttcactgaccacgagtatttaatttcatctgtgctaattaatgaaggacgtatgctcttatatgaaatgcatatatatggtatacagttccagtaccattcaaatcagtaacaaatgagatgtttgctctgtttagggaataaggaagaagggaaaaaaaatgacaaaattatacccagcggttgaatatgtagacaaaggagtttgcaaatttaagattttttttttttctgccaggcaagaccaataaatggcattaggagcactgacctacacatttattatttagtatcagatgatgtttgtgagtcctgtagttaaagactttagaacacagaaaaggtacgtgtgtttgtaatctgtgtatttcctccaacggagttccaggatttacgctcattttaaaatataagggtacgaacattttctgtggcagtgtatgtcatctccccaatgaccactacatgtcagaacagttcaagattactctcttggcagtaagaatacatgtatttcctttaaacttcttcttttgttttcctttatcttctactaaattaaatttagtcaacaaatacttatcataaaagggttgggaaatgctgactaaataaaatggaatatgtttatgaatatatgtaatatacatagtcatacatatgtacatatacatatgtagatttacagattttctcagtgccctcttgcactaatttacactgtggatttctaagagggaaaccttttaacaaggaccatttcaagggactaatgatttgtggtacaccctttaaggtcaacatcctagttggactccatattggagtctttaagagttcatatgctgggtgaactacatgatctctctctcttttttttttttttttttctgagacaagatctcactgtccccctggcaggactgcagtggtacagtcatagctcaccacagcctcgaactcctgggctcaagtgatcctcccatctcagcctcccaagtagctgggactgcaggcatatgccaccatacccagctggtttttatttatttttttgtagagacggggtcttgctatatttaccaggctggtcttgaactcctggcctcaagtgatcctcccacctcagcctcccaaagctctgggattataggtgtgagccactgcacccagctacctacatgatctcctaattcccactaaatcctgagactacaaggtactgatcatttcagatgttccctcaaagtcatctgaaaaactgctttctaggaacactcttattttgttatatgagatccagccatgcaataggttccaatttgtgtttcaggatggctgacttcaggctgcggaaactgaaggcaataatgttggcttttggaaggggcaagacgagaaactctgaagaaagctctgactctcaggaagttatctggaaagatacctggatgtttactgccttgggacactgtgggatctccatgtttggactatgggacagagaattgaccctaactaactaactatgaactatttatttcctcctcccctacccctagttaagtgccacaaagactgtgttatgtagtcagtacttttttctcatgtatctttctctagaccatttatatacgggtgaaatgaaagcttttttgcatgtacttgatactcagtctgtaaactcagacttcgctttttttgtgagactatcctttcaatatttttataaacttttgtgtgtgctgtggcagggaacagttaacaaggagtttatttagaggggtttttttcattttttgtttttcttgttttgttttgttttgttttgttcttcttggtgtgctttttggatgggaccagaacttaacattttcctgaggactaggaagctcatcagacactggaatgcagtgattcttctaatgatggtcaactgcaaggagaaactgtttacatccttcccactacacagttgctatgatatgtaacaagtcacacatgtatatatcacacaagtcttaccaattctgcgtcactaggaagctatagcatggtcgtgaaagctctcctaatacttacttaaatagccatggaagaaaattatgcttgtcccttctgactgggttaagccatctttcttaagattcctgaagtagaaatagcaattaagaaattaattcaagttttgacggttaacatttagcagaaaaacaaaccattgaataagctactaggtgaaatgcaaaacaaccatcaatttttttaaactcaataattttgtgaaaaaaaaaaccaccaccaaacttttggttgtaaaagagaacccttgttcccttcctaagaaactgccttccacaattaaagaatactcatagaaagaaaataatcataaatcatatttgattaacatttcatttaagcttttaaaatatcaattttttaaatagctcccatttacccaaaataactagttatgggtctatttcttccatgattagaggagagagaacttgattcaagatactgaaaaatagagctgggactgagcctgtgaatgacaggaatgatctattaccaggtgactagtcggaaactacacagacgtgcactggtctgcatttgggggctaaagtgtatatattccatttaaaatggaatttgtttgtatttggggcagtcttcagtaaagcctttctcctttcttttctccattgaggacagttctgctcagcaaaattgttgagtacctgttctgggcaggtcccacgctatatgcacaaagttaagaaaaacttggtcttagcccttgggagctgacagcccatgggcattaaggcaaagtagttccagtgatttaaaatacggttccaaatacgctaaaaccaacttgtgccaaccagatttacagattggaaatactgcagatgatgtgaagttatcagttggaggagctgtgattaagctggataataagagaacgtgccatctgtaaagcactcagaaggcagccatccctagatgttggtttcatgtatattacactatctactactatccataaatgcaataatatgcatgttaacaacattaaaaacagcaaacagcaatctaagtacagaaaagctttttgtgtgtttaaaaaaattgaagaaaattcaggaagaaacgtgttaataaacattgtactgttcttttgcttctcaaaggaattattcacttgccactttggttatttttgagttttcgtacataggaagttttatattgccagccttcctgtgataaagatattaaatgtaacttgagtaaaaaataaaaaagaataactatgtatatacatatataaattacatatgggcctgtatattgtgtgtgtatatacacagtaagtcctcatttgtccatagattcttggaaactgctactttaacaacttgaagttggtcttgaaacaactataacaagaccaactttttttctcatcaacgttgtaatgaaaggaaattgaatgaaattaccttgtggaggaccagtttgaacacttcatttgacttaaagttgctatttccaagaatctacagaccatgttaagtgaggacttacttactgtatacacacacacacacacacacacacacgcacacccccctattattactttgctgaagactaatttaagtctataacaaaactgccttataattatgattatatcatttactgacaaccagtgactctgatgtttccaatctatcaatttcccatcatcagtaaaataaaataggcaaatccacgatggggcaaaaagaacaatcacaattgactcctcctcaccttcattttgtaggtctgatgatcactgtcaccctgaaaattgaaaggaaaaacaaaagtaaactcttcttaacaatgaaaatgaggtatgaaggcaggatttattaaatgcttcaattgcatcttcattggagcatctacaaattgactgatgctttctcagacctgcctaaaccataggagccatgattggttatttgaacccttgtgttgagtggatatcccttgaagcaataatgtgcccagattttcatggtaagtttctacaatggacagaggagtttgcattttaaaaatgaaggcaggacttctgcagaagagaacgtcaaactgttattgatggtaggaagcttaattattcctaagataaatatgtgaattttgccaaaatatataaagctctagaatgactgaggagatcaattcagtgaaactgtaccacaaaagtgtacctttagcacgcaattcccaaccagactgaaatctcatcttggctgcttacagtcatggaatcctgggcaagtcaggtacatctatttgagccctcaatttcttcatttgaaaaaaagagatttcaccaccctcttcaactacctcatagagttttggtaaagatcaagtcagataatatatgtaaaagtatttgtaaagaccttatgttattattattttgcaattaagcaggattcttctctaaaactgtctcaagagcccagattttctctatattatatggctgtatatttggaggctctaaacccaatatttaactaaattttctgttaaaaaaagatgtatggtggctcatgcctgtaatcccagcactttgggaggccgaggcgggtagatcacaaggtcaggagatggagatcatcctggctaacacggtgaaaccccgtctgtaataaaatacaaaaaaaaattagccaggcatggtggtgcacacctgtagtcccagctatttgggaggctgaggcaggagaatggcgtgaacccagg
